(19) United States
(12) Patent Application Publication
(10) Pub. No.: US 2007/0082337 A1
(43) Pub. Date: Apr. 12, 2007

(54) Methods of identifying putative gene products by interspecies sequence comparison and biomolecular sequences uncovered thereby

(75) Inventors: Rotem Sorek, Tel-Aviv (IL); Sarah Pollock, Tel-Aviv (IL); Alex Diber, Rishon-LeZion (IL); Zurit Levine, Herzlia (IL); Sergey Nemzer, RaAnana (IL); Guy Kol, Givat Shmuel (IL); Assaf Wool, Kiryat-Ono (IL); Ami Haviv, Hod-HaSharon (IL); Yuval Cohen, Petach-Tikva (IL); Yossi Cohen, Woking (GB); Ronen Shemesh, ModiIn (IL); Kinneret Savitsky, Tel-Aviv (IL)

Correspondence Address: Martin D. Moynihan;PRTSI, Inc., P.O. Box 16446, Arlington, VA, 22215, US

(73) Assignee: Compugen Ltd., Tel Aviv (IL)

(21) Appl. No.: 11/043,591

(22) Filed: Jan. 27, 2005

Related U.S. Application Data
(60) Provisional application No. 60/579,202, filed on Jun. 15, 2004.
(60) Provisional application No. 60/539,128, filed on Jan. 27, 2004.

(51) Int. Cl. C12Q 1/68; G06F 19/00

(52) U.S. Cl. 435/6; 702/20

(57) ABSTRACT

A method of identifying alternatively spliced exons is provided. The method comprising, scoring each of a plurality of exon sequences derived from genes of a species according to at least one sequence parameter, wherein exon sequences of the plurality of exon sequences scoring above a predetermined threshold represent alternatively spliced exons, thereby identifying the alternatively spliced exons.

### RELATIONSHIP TO EXISTING APPLICATIONS

[0001] The present application claims priority from U.S. Provisional Patent Application No. 60/579,202, filed Jun. 15, 2004, and from U.S. Provisional Patent Application No. 60/539,128 filed Jan. 27, 2004, the contents of which are hereby incorporated by reference.

### FIELD OF THE INVENTION

[0002] The present invention relates to methods of identifying putative gene products by interspecies sequence comparison and, more particularly, to biomolecular sequences uncovered using these methodologies.

### BACKGROUND OF THE INVENTION

[0003] Alternative splicing of eukaryotic pre-mRNAs is a mechanism for generating many transcript isoforms from a single gene. It is known to play important regulatory functions. A classic example is the Drosophila sex-determination pathway, in which alternative splicing acts as a sex-specific genetic switch that forms the basis of a regulatory hierarchy [Boggs et al. (1987). Cell 50:739-747; Baker (1989) Nature 340:521-524; Lopez (1999) Annu. Rev. Genet. 32:279-305]. Another intriguing example was found in the inner ear of the chicken, where differential distribution of splice variants for the calcium-activated potassium channel gene slo may form a tonotopic gradient and attune sensory hair cells to the detection of different sound frequencies [Black (1998) Neuron 20:165-168; Ramanathan et al. (1999) Science 283:215-217; Graveley (2001) Trends Genet. 17:100-107]. Alternative splicing is also implicated in human diseases. For example, the neurodegenerative disease FTDP-17 has been associated with mutations that affect the alternative splicing of tau pre-mRNAs [Goedert et al. (2000) Ann. NY Acad. Sci. 920:74-83; Jiang et al. (2000) Mol. Cell. Biol. 20:4036-4048].

[0004] Initial sequencing and analysis of the human genome has placed further attention on the role of alternative splicing. The surprising finding that the genome contains about 30,000 protein-coding genes, significantly less than previously estimated, led to the proposal that alternative splicing contributes greatly to functional diversity [Ewing and Green (2000) Nat. Genet. 25:232-234; Lander et al. (2001) Nature 409:860-921; Venter et al. (2001) Science 291:1304-1351].

[0005] Expressed sequence tags (ESTs) provide a primary resource for analyzing gene products and predicting alternative splicing events. More than 5 million human ESTs are available to date, which provide a comprehensive sample of the transcriptome. In recent years, numerous studies attempted to computationally assess the extent of alternative splicing in the human genome. With the availability of a nearly complete sequence of the human genome, aligning ESTs to the genome has become a common strategy.

[0006] A number of methods based on this strategy have been developed, to enable large-scale analysis of alternative splicing [Brett (2000) FEBS Lett. 47:83-86; Kan (2002) Genome Res. 12:1837-1845; Kan (2001) Genome Res. 11:875-888; Lander (2001) Nature 409:860-921; Mironov (1999) Genome Res. 9:1288-1293; Modrek (2001) Nucleci Acids Res. 29:2850-2859; Hide (2001) Genome Res. 11:1848-1853]. Some of these are summarized infra.

[0007] Mironov et al. have developed an algorithm for predicting exon-intron structure of genomic DNA fragments using EST data. This algorithm (Procrustes-EST) is based on the previously published spliced alignment algorithm [Gelfand et al. (1996) Proc. Natl. Acad. Sci. USA. 93:9061-9066], which explores all possible exon assemblies in polynomial time and finds the multiexon structure with the best fit to a related protein. When applied to known human genes and TIGR EST assemblies, the software found a large number of alternatively spliced genes (˜35%). Most of the alternative splicing events occurred in 5′-untranslated regions. In many cases the use of this software allowed for linking and merging multiple existing assemblies into single contigs [Mironov (1999) Genome Reseach 9:1288-1293].

[0008] Kan et al. have developed a software tool, Transcript Assembly Program (TAP), that infers the predominant gene structure and reports alternative splicing events using genomic EST alignments [Kan (2001) Genome Research 11:889-900. The gene structure is assembled from individual splice junction pairs using connectivity information encoded in the ESTs. A method called PASS (Polyadenylation Site Scan) is used to infer poly-A sites from 3′ EST clusters. The gene boundaries are identified using the poly-A site predictions. Reconstructing about one thousand known transcripts, TAP scored a sensitivity of 60% and a specificity of 92% at the exon level. The gene boundary identification process was found to be accurate 78% of the time. TAP also reports alternative splicing patterns in EST alignments. An analysis of alternative splicing in 1124 genomic regions suggested that more than half of human genes undergo alternative splicing. Furthermore, the evolutionary conservation of alternative splicing between human and mouse was analyzed using an EST-based approach.

[0009] Modrek et al. have performed a genome-wide analysis of alternative splicing based on human EST data. Tens of thousands of splices and thousands of alternative splices were identified in thousands of human genes. These were mapped onto the human genome sequence to verify that the putative splice junctions detected in the expressed sequences map onto genomic exon intron junctions that match the known splice site consensus [Modrek (2001) Nucleic Acids Research, 29:2850-2859].

[0010] As mentioned, the above-described approaches use EST data or full-length cDNA sequences to detect alternative splicing. However, expressed sequences present a problematic source of information, as they are merely a sample of the transcriptome. Thus, the detection of a splice variant is possible only if it is expressed above a certain expression level, or if there is EST library prepared from the tissue type in which the variant is expressed. In addition, ESTs are very noisy and contain numerous erroneous sequences [Sorek (2003) Nucleic Acids. Res. 31: 1067-1074]. For example, many wrongly termed splice events represent incompletely spliced heteronuclear RNA (hnRNA) or oligo(dT)-primed genomic DNA contaminants of cDNA library constructions. Furthermore, the splicing apparatus is known to make errors, resulting in aberrant transcripts that are degraded by the mRNA surveillance system and amount to little that is functionality important [Maquat and Charmichael (2001) Cell 104:173-176; Modrek and Lee (2001) Nat. Genet. 30:13-19]. Consequently the mere presence of a transcript isoform in the ESTs cannot establish a functional role for it. Thus, the use of expressed sequence data allows only very general estimates regarding the number of genes that have splice variants (currently running between 35% and 75%), but does not allow specific estimation regarding the actual number of exons that can be alternatively spliced.

### SUMMARY OF THE INVENTION

[0011] The background art fails to teach or suggest a method for large-scale prediction of alternative splicing events, which is devoid of the previously described limitations.

[0012] According to one aspect of the present invention there is provided a method of identifying alternatively spliced exons, the method comprising, scoring each of a plurality of exon sequences derived from genes of a species according to at least one sequence parameter, wherein exon sequences of the plurality of exon sequences scoring above a predetermined threshold represent alternatively spliced exons, thereby identifying the alternatively spliced exons.

[0013] According to another aspect of the present invention there is provided a system for generating a database of alternatively spliced exons, the system comprising a processing unit, the processing unit executing a software application configured for: (a) scoring each of a plurality of exon sequences derived from genes of a species according to at least one sequence parameter, wherein exon sequences of the plurality of exon sequences scoring above a predetermined threshold represent alternatively spliced exons, to thereby identify the alternatively spliced exons; and (b) storing the identified alternatively spliced exons to thereby generate the database of alternatively spliced exons.

[0014] According to yet another aspect of the present invention there is provided a computer readable storage medium comprising data stored in a retrievable manner, the data including sequence information as set forth in the files “transcripts. fasta” and “proteins.fasta” of enclosed CD-ROM1 and in the files “transcripts” and “proteins” of enclosed CD-ROM2 and sequence annotations as set forth in the file “AnnotationForPatent.txt” of enclosed, CD-ROM1.

[0015] According to still another aspect of the present invention there is provided a method of predicting expression products of a gene of interest, the method comprising: (a) scoring exon sequences of the gene of interest according to at least one sequence parameter and identifying exon sequences scoring above a predetermined threshold as alternatively spliced exons of the gene of interest; and (b) analyzing chromosomal location of each of the alternatively spliced exons with respect to coding sequence of the gene of interest to thereby predict expression products of the gene of interest.

[0016] According to an additional aspect of the present invention there is provided a method of predicting expression products of a gene of interest in a given species, the method comprising (a) providing a contig of exon sequences of the gene of interest of a first species; (b) identifying exon sequences of an orthologue of the gene of interest of the first species which align to a genome of the first species (c) assembling the exon sequences of the orthologue of the gene of interest in the contig, thereby generating a hybrid contig; (d) identifying in the hybrid contig, exon sequences of the orthologue of the gene of interest, which do not align with the exon sequences of the gene of interest of the first species, thereby uncovering non-overlapping exon sequences of the gene of interest; and (e) analyzing chromosomal location of non-overlapping exon sequences of the gene of interest with respect to the chromosomal location of the gene of interest to thereby predict expression products of the gene of interest in a given species.

[0017] According to further features in preferred embodiments of the invention described below, at least a portion of the exon sequences are alternatively spliced sequences.

[0018] According to still further features in the described preferred embodiments the alternatively spliced sequences are identified by scoring exon sequences of the gene of interest according to at least one sequence parameter, wherein exon sequences scoring above a predetermined threshold represent the alternatively spliced exons of the gene of interest.

[0019] According to still further features in the described preferred embodiments the at least one sequence parameter is selected from the group consisting of: (i) exon length; (ii) division by 3; (iii) conservation level between the plurality of exon sequences of genes of a species and corresponding exon sequences of genes of ortholohgous species; (iv) length of conserve intron sequences upstream of each of the plurality of exon sequences; (v) length of conserved intron sequences downstream of each of the plurality of exon sequences; (vi) conservation level of the intron sequences upstream of each of the plurality of exon sequences; and (vii) conservation level of the intron sequences downstream of each of the plurality of exon sequences;

[0020] According to still further features in the described preferred embodiments the exon length does not exceed 1000 bp.

[0021] According to still further features in the described preferred embodiments the conservation level is at least 95%.

[0022] According to still further features in the described preferred embodiments the length of conserved intron sequences upstream of each of the plurality of exon sequences is at least 12.

[0023] According to still further features in the described preferred embodiments the length of conserved intron sequences downstream of each of the plurality of exon sequences is at least 15.

[0024] According to still further features in the described preferred embodiments the conservation level off the intron sequences upstream of each of the plurality of exon sequences is at least 85%.

[0025] According to still further features in the described preferred embodiments the conservation level of the intron sequences downstream of each of the plurality of exon sequences is at least 60%.

[0026] According to yet an additional aspect of the present invention there is provided an isolated polynucleotide comprising a nucleic acid sequence being at least 70% identical to a nucleic acid sequence of the sequences set forth in file “transcripts.fasta” of CD-ROM1 or in the file “transcripts” of CD-ROM2.

[0027] According to still further features in the described preferred embodiments the nucleic acid sequence is set forth in the file “transcripts.fasta” of enclosed CD-ROM1 or in the file “transcripts” of enclosed CD-ROM 2.

[0028] According to still an additional aspect of the present invention there is provided an isolated polynucleotide comprising a nucleic acid sequence encoding a polypeptide having an amino acid sequence at least 70% homologous to a sequence set forth in the file “proteins.fasta” of enclosed CD-ROM1 or in the file “proteins” of enclosed CD-ROM2.

[0029] According to a further aspect of the present invention there is provided an isolated polypeptide having an amino sequence at least 80% homologous to a sequence set forth in the file proteins fasta” of enclosed CD-ROM1 or in the file “proteins” of enclosed CD-ROM2.

[0030] According to yet a further aspect of the present invention there is provided use of a polynucleotide or polypeptide set forth in the file “transcripts.fasta” of CD-ROM1 or in the file “transcripts” of CD-ROM2 or in the file “proteins.fasta” of enclosed CD-ROM1 or in the file “proteins” of enclosed CD-ROM2 for the diagnosis and/or treatment of the diseases listed in Example 8.

[0031] In addition, a brief description of exemplary, non-limiting embodiments of the present invention related to the proteins listed in Table 3 is given below, with regard to the amino acid sequences of the splice variants as compared to the wild type sequences. As is further described hereinbelow, the present invention encompasses both nucleic acid and amino acid sequences, as well as homologs, analogs and derivatives thereof. The present invention also encompasses the exemplary protein (amino acid) sequences as described below.

[0032] The below description is given as follows. Each sequence is described with regard to the name of the splice variant as given in the included file. For example, for the first sequence below, the name of the splice variant is “ANGPT1_Skippingexon_{—}5_#PEP_NUM_{—}117”, which is a variant of the wild type protein “ANGPT1”. The splice variant sequence for this variant is described with reference to the wild type amino acid sequence: the amino acid sequence of the splice variant ANGPT1_Skippingexon_{—}5_#PEP_NUM_{—}117 is comprised of a first amino acid sequence that is at least about 90% homologous to amino acids 1-269 of the amino acid sequence of the wild type protein ANGPT1; and a second amino acid sequence that is at least about 70%, optionally at least about 80%, preferably at least about 85%, more preferably at least about 90% and most preferably at least homologous to a polypeptide having the sequence GVLQYGCQWGRLDCNTTS (SEQ ID NO: 205), which corresponds to the unique “tail” sequence. Therefore, the splice variant has a first portion having at least about 90% homology to the specified part of the wild type amino acid sequence, and a second portion with the described homology to the unique tail sequence.

[0033] The phrase “contiguous and in a sequential order” indicates that these two portions are part of the same polypeptide (are contiguous) and are in the order given (in a sequential order), as described above with regard to the example.

[0034] Also as described above, the term “tail” refers to a portion at the C-terminus of the splice variant protein. An “edge portion” occurs at the junction of two exons that are now contiguous in the splice variant, but were not contiguous in the corresponding wild type protein. A “bridging polypeptide” is a unique sequence (of the splice variant). Located between two amino acid sequences that correspond to portions of the wild type protein. Any of the tail, the edge portion or the bridging polypeptide may be at least about 70%, optionally at least about 80%, preferably at least about 85%, more preferably at least about 90%, and most preferably at least about 95% homologous to the sequences given below. A “bridging amino acid” is an amino acid in the splice variant that is located between two amino acid sequences that correspond to portions of the wild type protein.

[0035] Optionally and preferably the edge portion, the bridging polypeptide or the tail may optionally be used as a peptide therapeutic, and/or in an assay (such as a diagnostic assay for example), and/or or as partial or complete antibody epitope that is capable of being specifically bound by and/or elicited by an antibody, preferably a monoclonal antibody and/or a fragment of an antibody. For example, a splice variant may be differentially expressed as compared to the wild type protein with regard to

[0036] Optionally, although the percent homology of the portion(s) of a splice variant that correspond to a wild type sequence is preferably at least about 90%, optionally the percent homology is at least about 70%, also optionally at least about 80%, preferably at least about 85%, and most preferably at least about 95% homologous to the corresponding part of the wild type sequence.

[0037] It should also be noted that although the edge portions are described as being 22 amino acids in length (11 on either side of the join that is present in the splice variant between two portions of the wild type protein), or 23 amino acids in length if a bridge amino acid is present, the length of an edge portion can also optionally be any number of amino acids from about 10 to about 50, or any number within this range, optionally from about 15 to about 30, preferably from about 20 to about 25 amino acids.

[0038] The exemplary embodiments of the present invention are given below with regard to the described sequences.

[0039] An isolated ANGPT1_Skippingexon_{—}5_#PEP_NUM_{—}117 polypeptide, comprising a first amino acid sequence being at least about 90% homologous to amino acids 1-269 of ANGPT1, and a second amino acid sequence being at least about 70%, optionally at least about 80%, preferably at least about 85% more preferably at least about 90% and most preferably at least about 95% homologous to a polypeptide having the sequence GVLQYGCQWGRLDCNTTS (SEQ ID NO: 205), Wherein said first and said second amino acid sequences are contiguous and in a sequential order.

[0040] An isolated polypeptide corresponding to a tail of ANGPT1_Skippingexon_{—}5_#PEP_NUM_{—}117, comprising a polypeptide having the sequence GVLQYGCQWGRLDCNTTS (SEQ ID NO: 205).

[0041] An isolated ANGPT1_Skippingexon_{—}6_#PEP_NUM_{—}118 polypeptide, comprising a first amino acid sequence being at least about 90% homologous to amino acids 1-312 of ANGPT1, and a second amino acid sequence being at least about 90% homologous to amino acids 347-498 of ANGPT1 wherein said first and said second amino acid sequences are contiguous and in a sequential order.

[0042] An isolated polypeptide of an edge portion of ANGPT1_Skippingexon_{—}6_#PEP_NUM_{—}118, comprising a first amino acid sequence being at least about 90% homologous to amino acids 302-312, of ANGPT1, and a second amino acid sequence being at least about 90% homologous to amino acids 347-357 of ANGPT1, wherein said first and said second amino acid sequences are contiguous and in a sequential order.

[0043] An isolated ANGPT1_Skippingexon_{—}8_#PEP_NUM_{—}119 polypeptide, comprising a first amino acid sequence being at least about 90% homologous to amino acids 1-401 of ANGPT1, and a second amino acid sequence being at least about 70%, optionally at least about 80%, preferably at least about 85%, more preferably at least about 90% and most preferably at least about 95% homologous to a polypeptide having the sequence MW, wherein said first and said second amino acid sequences are contiguous and in a sequential order.

[0044] An isolated polypeptide corresponding to a tail of ANGPT1₁₃ Skippingexon_{—}8_#PEP_NUM_{—}119, comprising a polypeptide having the sequence MW.

[0045] An isolated APBB1_Skippingexon_{—}10_#PEP_NUM_{—}159 polypeptide, comprising a first amino acid sequence being at least about 90% homologous to amino acids 1-501 of APBB1, and a second amino acid sequence being at least about about 70%, optionally at least about 80%, preferably at least about 85%, more preferably at least about 90% and most preferably at least about 95% homologous to a polypeptide having the sequence WNSQRLRMSWSRSSKSITWGMYLLLNLLG (SEQ ID NO: 206), wherein said first and said second amino acid sequences are contiguous and in a sequential order.

[0046] An isolated polypeptide corresponding to a tail of APBB1_Skippingexon_{—}10_#PEP_NUM_{—}159, comprising a polypeptide having the sequence WNSQRLRMSWSRSSKSITWGMYLLLNLLG (SEQ ID NO: 206).

[0047] An isolated APBB1_Skippingexon_{—}12_#PEP_NUM_{—}160 polypeptide comprising a first amino acid sequence being at least about 90% homologous to amino acids 1-557 of APBB1, and a second amino acid sequence being at least about 70%, optionally at least about 80%, preferably at least about 85%, more preferably at least about 90% and most preferably at least about 95% homologous to a polypeptide having the sequence DRGSAGRVSGAFPLLPGRGQRCPHVCIHHGCRPSLLLLPHVLVRAQCCQPLR GCAGCVHASLPEVSGCPFPGLHLLPPSTPC (SEQ ID NO: 207), wherein said first and said second amino acid sequences are contiguous and in a sequential order.

[0048] An isolated polypeptide corresponding to a tail of APBB1_Skippingexon_{—}12_#PEP_NUM_{—}160, comprising a polypeptide having the sequence DRGSAGRVSGAFPLLPGRGQRCPHVCIHHGCRPSLLLLPHVLVRAQCCQPLR GCAGCVHASLPEVSGCPFPGLHLLPPSTPC (SEQ ID NO: 207).

[0049] An isolated APBB1_Skippingexon_{—}3_#PEP_NUM_{—}156 polypeptide, comprising a first amino acid sequence being 16 at least about 90% homologous to amino acids 1-240 of APBB1, and a second amino acid sequence being at least about 70%, optionally at least about 80%, preferably at least about 85%, more preferably at least about 90% and most preferably at least about 95% homologous to a polypeptide having the sequence AHLDRFCSWRRL (SEQ ID NO: 208), wherein said first and said second amino acid sequences are contiguous and in a sequential order.

[0050] An isolated polypeptide corresponding to a tail of APBB1_Skippingexon_{—}3_#PEP_NUM_{—}156, comprising polypeptide having the sequence AHLDRFCSWRRL (SEQ ID NO: 208).

[0051] An isolated APBB1_Skippingexon_{—}7_#PEP_NUM_{—}157 polypeptide, comprising a first amino acid sequence being at least about 90% homologous to amino acids 1-368 of APBB1, and a second amino acid sequence being at least about 90% homologous to amino acids 414-710 of APBB1, wherein said first and said second amino acid sequences are contiguous and in a sequential order.

[0052] An isolated polypeptide of an edge portion of APBB1_Skippingexon_{—}7_#PEP_NUM_{—}157, comprising a first amino acid sequence being at least about 90% homologous to amino acids 358-368 of APBB1, and a second amino acid sequence being at least about 90% homologous to amino acids 414-424 of APBB1, wherein said first and said second amino acid sequences are contiguous and in a sequential order.

[0053] An isolated APBB1_Skippingexon_{—}9_#PEP_NUM_{—}158 polypeptide, comprising a first amino acid sequence being at least about 90% homologous to amino acids 1-462 of APBB1, and a second amino acid sequence being at least about 90% homologous to amino acids 502-710 of APBB1, wherein said first and said second amino acid sequences are contiguous and in a sequential order.

[0054] An isolated polypeptide of an edge portion of APBB1_Skippingexon_{—}9_#PEP_NUM_{—}158, comprising a first amino acid sequence being at least about 90% homologous to amino acids 452-462 of APBB1, and a second amino acid sequence being at least about 90% homologous to amino acids 502-512 of APBB1, wherein said first and said second amino acid sequences are contiguous and in a sequential order.

[0055] An isolated CUL5_Skippingexon_{—}2_#PEP_NUM_{—}137 polypeptide, comprising a first amino acid sequence being at least about 90% homologous to amino acids 1-8 of CUL5, and a second amino acid sequence being at least about 70%, optionally at least about 80%, preferably at least about 85%, more preferably at least about 90% and most preferably at least about 95% homologous to a polypeptide having the sequence GCACSLSLG (SEQ ID NO: 209), wherein said first and said second amino acid sequences are contiguous and in a sequential order.

[0056] An isolated polypeptide corresponding to a tail of CUL5_Skippingexon_{—}2_#PEP_NUM_{—}137, comprising a polypeptide having the sequence GCACSLSLG (SEQ ID NO: 209).

[0057] An isolated CUL5_Skippingexon_{—}2_#PEP_NUM_{—}138 polypeptide, consisting essentially of an amino acid sequence being at least about 90% homologous to amino acids 119-780 of CUL5.

[0058] An isolated CUL5_Skippingexon_{—}8_#PEP_NUM_{—}139 polypeptide, comprising a first amino acid sequence being at least 90% homologous to amino acids 1-260 of CUL5, and a second amino acid sequence being at least 70% optionally at least 80%, preferably at least 85%, more preferably at least 90% and most preferably at least 95% homologous to a polypeptide having the sequence NYI, wherein said first and said second amino acid sequences are contiguous and in a sequential order.

[0059] An isolated polypeptide corresponding to a tail of CUL5_Skippingexon_{—}8_#PEP_NUM_{—}139, comprising a polypeptide having the sequence NYI.

[0060] An isolated ECE1_Skippingexon_{—}2_#PEP_NUM_{—}129 polypeptide, comprising a first amino acid sequence being at least about 90% homologous to amino acids 1-17 of ECE1, and a second amino acid sequence being at least about 90% homologous to amino acids 47-770 of ECE1, wherein said first and said second amino acid sequences are contiguous and in a sequential order.

[0061] An isolated polypeptide of an edge portion of ECE1_Skippingexon_{—}2_#PEP_NUM_{—}129, comprising a first amino acid sequence being at least about 90% homologous to amino acids 7-17 of ECE1, and a second amino acid sequence being at least about 90% homologous to amino acids 47-57 of ECE1, wherein said first and said second amino acid sequences are contiguous and in a sequential order.

[0062] An isolated ECE2_Skippingexon_{—}12_#PEP_NUM_{—}132 polypeptide comprising a first ammo acid sequence being at least 90% homologous to amino acids 1-458 of ECE2 and a second amino acid sequence being at least 90% homologous to amino acids 492-765 of ECE2 or a portion thereof wherein said first and said second amino acid sequences are contiguous and in a sequential order.

[0063] An isolated polypeptide of an edge portion of ECE2_Skippingexon_{—}12_#PEP_NUM_{—}132, comprising a first amino acid sequence being at least 90% homologous to amino acids 448-458 of ECE2 or a portion thereof, and a second amino acid sequence being at least 90% homologous to amino acids 492-502 of ECE2 or a portion thereof, wherein said first and said second amino acid sequences are contiguous and in a sequential order.

[0064] An isolated ECE2_Skippingexon_{—}13_#PEP_NUM_{—}133 polypeptide, comprising a first amino acid sequence being at least 90% homologous to amino acids 1-491 of ECE2, and a second amino acid sequence being at least 90% homologous to amino acids 518-765 of ECE2 or a portion thereof, wherein said first and said second amino acid sequences are contiguous and in a sequential order.

[0065] An isolated polypeptide of an edge portion of ECE2_Skippingexon_{—}13_#PEP_NUM_{—}133, comprising a first amino acid sequence being at least 90% homologous to amino acids 481-491 of ECE2 or a portion thereof, and a second amino acid sequence being at least 90% homologous to amino acids 518-528 of ECE2 or a portion thereof, wherein said first and said second amino acid sequences are contiguous and in a sequential order.

[0066] An isolated ECE2_Skippingexon_{—}15_#PEP_NUM_{—}134 polypeptide, comprising a first amino acid sequence being at least 90% homologous to amino acids 1-552 of ECE2, and a second amino acid sequence being at least 90% homologous to amino acids 590-765 of ECE2 or a portion thereof, wherein said first and said second amino acid sequences are contiguous and in a sequential order.

[0067] An isolated polypeptide of an edge portion of ECE2_Skippingexon_{—}15_#PEP_NUM_{—}134, comprising a first amino acid sequence being at least 90% homologous to amino acids 542-552 of ECE2 or a portion thereof, and a second amino acid sequence being at least 90% homologous to amino acids 590-600 of ECE2 or a portion thereof, wherein said first and said second amino acid sequences are contiguous and in a sequential order.

[0068] An isolated ECE2_Skippingexon_{—}2_#PEP_{—}130 polypeptide, comprising a first amino acid sequence being at least about 90% homologous to amino acids 1-13 of ECE2, and a second amino acid sequence being at least about 90% homologous to amino acids 43-765 of ECE2, wherein said first and said second amino acid sequences are contiguous and in a sequential order.

[0069] An isolated polypeptide of an edge portion of ECE2_Skippingexon_{—}2_#PEP_NUM_{—}130, comprising a first amino acid sequence being at least about 90% homologous to amino acids 3-13 of ECE2, and a second amino acid sequence being at least about 90% to amino acids 43-53 of ECE2, wherein said first and said second amino acid sequences are contiguous and in a sequential order.

[0070] An isolated ECE2_Skippingexon_{—}8_#PEP_NUM_{—}131 polypeptide, comprising a first amino acid sequence being at least about 90% homologous to amino acids 1-272 of ECE2, and a second amino acid sequence being at least about 90% homologous to amino acids 336-765 of ECE2, wherein said first and said second amino acid sequences are contiguous and in a sequential order.

[0071] An isolated polypeptide of an edge portion of ECE2_Skippingexon_{—}8_#PEP_NUM_{—}131, comprising a first amino acid sequence being at least about 90% homologous to amino acids 262-272 of ECE2, and a second amino acid sequence being at least about 90% homologous to amino acids 336-346 of ECE2, wherein said first and said second amino acid sequences are contiguous and in a sequential order.

[0072] An isolated EDNRB_Skippingexon_{—}4_#PEP_NUM_{—}128 polypeptide, comprising a first amino acid, sequence being at least about 90% homologous to amino acids 1-198 of EDNRB, and a second amino acid sequence being at least about 70%, optionally at least about 80%, preferably at least about 85%, more preferably at least about 90% and most preferably at least about 95% homologous to a polypeptide having the sequence SFTRQQKIGGYSVSISACHWPSLHFFIH (SEQ ID NO: 210), wherein said first and said second amino acid sequences are contiguous and in a sequential order.

[0073] An isolated polypeptide corresponding to a tail of EDNRB_Skippingexon_{—}4_#PEP_NUM_{—}128, comprising a polypeptide having the sequence SFTRQQKIGGYSVSISACHWPSLHFFIH (SEQ ID NO: 210).

[0074] An isolated EFNA1_Skipping_exon_{—}3_#PEP_NUM_{—}42 polypeptide, comprising a first amino acid sequence being at least about 90% homologous to amino acids 1-130 of EFNA1, and a second amino acid sequence being at least about 90% homologous to amino acids 153-205 of EFNA1, wherein said first and said second amino acid sequences are contiguous and in a sequential order.

[0075] An isolated polypeptide, of an edge portion of EFNA1_Skipping_exon_{—}3_#PEP_NUM 42, comprising a first amino acid sequence being at least 90% homologous to amino acids 120-130 of EFNA1, and a second amino acid sequence being at least about 90% homologous to amino acids 153-163 of EFNA1, wherein said first and said second amino acid sequences are contiguous and in a sequential order.

[0076] An isolated EFNA3_Skippingexon_{—}3_#PEP_NUM_{—}43 polypeptide, comprising a first amino acid sequence being at least about 90% homologous to amino acids 1-148 of EFNA3, and a second amino acid sequence being at least about 90% homologous to amino acids 171-238 of EFNA3, wherein said first and said second amino acid sequences are contiguous and in a sequential order.

[0077] An isolated polypeptide of an edge portion of EFNA3_Skippingexon_{—}3_#PEP_NUM 43, comprising a firsts amino acid sequence being at least about 90% homologous to ammo acids 138-148 of EFNA3, and a second amino acid sequence being at least about 90% homologous to amino acids 171-181 of EFNA3, wherein said first and said second amino acid sequences are contiguous and in a sequential order.

[0078] An isolated EFNA3_Skippingexon_{—}4_#PEP_NUM_{—}44 polypeptide, comprising a first amino acid sequence being at least about 90% homologous to amino acids 1-169 of EFNA3, a bridging amino acid K and a second amino acid sequence being at least about 90% homologous to amino acids 197-238 of EFNA3, wherein said first amino acid sequence is contiguous to said bridging amino acid and said second amino acid sequence is contiguous to said bridging amino acid, and wherein said first amino acid sequence, said bridging amino acid and said second amino acid sequence are in a sequential order.

[0079] An isolated polypeptide of an edge portion of EFNA3_Skippingexon_{—}4_#PEP_NUM_{—}44, comprising a first amino acid sequence being at least about 90% homologous to amino acids 159-169 of EFNA3, a bridging amino acid K and a second amino acid sequence being at least about 90% homologous to amino acids 197-207 of EFNA3, wherein said first amino acid sequence is contiguous to said bridging amino acid and said second amino acid sequence is contiguous to said bridging amino acid, and wherein said first amino acid sequence, said bridging amino acid and said second amino acid sequence are in a sequential order.

[0080] An isolated EFNA5_Skipping_exon_{—}3_#PEP_NUM_{—}45 polypeptide, comprising a first ammo acid sequence being at least about 90% homologous to amino acids 1-139 of EFNA5, a bridging amino acid Y and a second amino acid sequence being at least 90% homologous to amino acids 163-228 of EFNA5, wherein said first amino acid sequence is contiguous to said bridging amino acid and said second amino acid sequence is contiguous to said bridging amino acid, and wherein said first amino acid sequence, said bridging amino acid and said second amino acid sequence are in a sequential order.

[0081] An isolated polypeptide of an edge portion of EFNA5_Skipping_exon_{—}3_#PEP_NUM_{—}45, comprising a first amino acid sequence being at least about 90% homologous to amino acids 129-139 of EFNA5, a bridging amino acid Y and a second amino acid sequence being at least about 90% homologous to amino acids 163-173 of EFNA5, wherein said first amino acid sequence is contiguous to said bridging amino acid and said second amino acid sequence is contiguous to said bridging amino acid, and wherein said first amino acid sequence, said bridging amino acid and said second amino acid sequence are in a sequential order.

[0082] An isolated EFNA5_Skipping_exon_{—}4_#PEP_NUM_{—}46 polypeptide, comprising a first amino acid sequence being at least about 90% homologous to amino acids 1-162 of EFNA5, and a second amino acid sequence being at least about 90% homologous to amino acids 189-228 of EFNA5, wherein said first and said second amino acid sequences are contiguous and in a sequential order.

[0083] An isolated polypeptide of an edge portion of EFNA5_Skipping_exon_{—}4_#PEP_NUM_{—}46, comprising a first amino acid sequence being at least about 90% homologous to amino acids 152-162 of EFNA5, and at second amino acid sequence being at least about 90% homologous to amino acids 189-199 of EFNA5, wherein said first and said second amino acid sequences are contiguous and in a sequential order.

[0084] An isolated EFNB2_Skipping_exon_{—}2_#PEP_NUM_{—}47 polypeptide, comprising a first amino acid sequence being at least about 90% homologous to amino acids 1-40 of EFNB2, and a second amino acid sequence being at least about 70%, optionally at least about 80%, preferably at least about 85%, more preferably at least 90% and most preferably at least about 95% homologous to a polypeptide having the sequence NYIKWVFGGPG (SEQ ID NO: 211), wherein said first and said second amino acid sequences are contiguous and in a sequential order.

[0085] An isolated polypeptide corresponding to a tail of EFNB2_Skipping_exon_{—}2_#PEP_NUM 47, comprising a polypeptide having the sequence NYIKWVFGGPG (SEQ ID NO: 211).

[0086] An isolated EFNB2_Skipping_exon_{—}3_#PEP_NUM_{—}48 polypeptide, comprising a first amino acid sequence being at least about 90% homologous to amino acids 1-135 of EFNB2, a bridging amino acid Y and a second amino acid sequence being at least about 90% homologous to amino acids 169-333 of EFNB2, wherein said first amino acid sequence is contiguous to said bridging amino acid and said second amino acid sequence is contiguous to said bridging amino acid, and wherein said first amino acid sequence, said bridging amino acid and said second amino acid sequence are in a sequential order.

[0087] An isolated polypeptide of an edge portion of EFNB2_Skipping_exon_{—}3_#PEP_NUM_{—}48, comprising a first amino acid sequence being at least about 90% homologous to amino acids 125-135 of EFNB2, a bridging amino acid Y and a second amino acid sequence being at least about 90% homologous to amino acids 169-179 of EFNB2, wherein said first amino acid sequence is contiguous to said bridging amino acid and said second amino acid sequence is contiguous to said bridging amino acid, and wherein said first amino acid sequence, said bridging amino acid and said second amino acid sequence are in a sequential order.

[0088] An isolated EFNB2_Skipping_exon_{—}4_#PEP_NUM_{—}49 polypeptide, comprising a first amino acid sequence being at least about 90% homologous to amino acids 1-166 of EFNB2, and a second amino acid sequence being at least about 90% homologous to amino acids 205-333 of EFNB2, wherein said first and said second amino acid sequences are contiguous hand in a sequential order.

[0089] An isolated polypeptide of an edge portion of EFNB2_Slipping_exon_{—}4_#PEP_NUM 49, comprising a first amino acid sequence being at least about 90% homologous to amino acids 156-166 of EFNB2, and a second amino acid sequence being at least about 90% homologous to amino acids 205-215 of EFNB2, wherein said first and said second amino acid sequences are contiguous and in a sequential order.

[0090] An isolated EPHA4_Skipping_exon_{—}12_#PEP_NUM_{—}53 polypeptide, consisting essentially of an amino acid sequence being at least about 90% homologous to amino acids 1-691 of EPHA4.

[0091] An isolated EPHA4_Skipping_exon_{—}2_#PEP_NUM_{—}50 polypeptide, comprising a first amino acid sequence being at least about 90% homologous to amino acids 1-31 of EPHA4, and a second amino acid sequence being at least about 70%, optionally at least about 80% preferably at least about 85%, more preferably at least about 90% and most preferably at least about 95% homologous to a polypeptide having the sequence GGSEYHG (SEQ ID NO: 212), wherein said first and said second amino acid sequences are contiguous and in a sequential order.

[0092] An isolated polypeptide corresponding to a tail of EPHA4_Skipping_exon_{—}2_#PEP_NUM_{—}50, comprising a polypeptide having the sequence GGSEYHG (SEQ ID NO: 212).

[0093] An isolated EPH4_Skipping_exon_{—}3_#PEP_NUM_{—}51 polypeptide comprising a first amino acid sequence being at least about 90% homologous to amino acids 1-53 of EPHA4, and a second amino acid sequence being at least about 70%, optionally at least about 80%, preferably at least about 85%, more preferably at least about 90% and most preferably at least about 95% homologous to a polypeptide having the sequence LAKLDITRLSPRMPPVPSAHPTATLSGKEPPRAPVTEAFSELTTMLPLCPAPVH HLLP (SEQ ID NO: 213), wherein said first and said second amino acid sequences are contiguous and in a sequential order.

[0094] An isolated polypeptide corresponding to a tall of EPHA4_Skipping_exon_{—}3_#PEP_NUM 51, comprising a polypeptide having the sequence LAKLDITRLSPRMPPVPSAHPTATLSGKEPPRAPVTEAFSELTTMLPLCPAPVH HLLP (SEQ ID NO: 213).

[0095] An isolated EPHA4_Skipping_exon_{—}4_#PEP_NUM_{—}52 polypeptide, comprising a first amino acid sequence being at least about 90% homologous to amino acids 1-274 of EPHA4, a bridging amino acid G and a second amino acid sequence being at least about 90% homologous to amino acids 328-986 of EPHA4, wherein said first amino acid sequence is contiguous to said bridging amino acid and said second amino acid sequence is contiguous to said bridging amino acid, and wherein said first amino acid sequence, said bridging amino acid and said second amino acid sequence are in a sequential order.

[0096] An isolated polypeptide of an edge portion of EPHA4_Skipping_exon_{—}4_#PEP_NUM_{—}52, comprising a first amino acid sequence being at least about 90% homologous to amino acids 264-274 of EPHA4, a bridging amino acid G and a second amino acid sequence being at least about 90% homologous to amino acids 328-338 of EPHA4, wherein said first amino acid sequence is contiguous to said bridging amino acid and said second amino acid sequence is contiguous to said bridging amino acid, and wherein said first amino acid sequence, said bridging amino acid and said second amino acid sequence are in a sequential order.

[0097] An isolated EPHA5_Skipping_exon_{—}10_#PEP_NUM_{—}57 polypeptide, consisting essentially of an amino acid sequence being at least about 90% homologous to amino acids 1-618 of EPHA5-followed by C.

[0098] An isolated EPHA5_Skipping_exon_{—}14_#PEP_NUM_{—}58 polypeptide, comprising a first amino acid sequence being at least about 90% homologous to amino acids 1-766 of EPHA5, and a second amino acid sequence being at least about 90% homologous to amino acids 837-1037 of EPHA5, wherein said first and said second amino acid sequences are contiguous and in a sequential order.

[0099] An isolated polypeptide of an edge portion of EPHA5_Skipping_exon_{—}14_#PEP_NUM_{—}58, comprising a first amino acid sequence being at least about 90% homologous to amino acids 756-766 of EPHA5, and a second amino acid sequence being at least about 90% homologous to amino acids 837-847 of EPHA5, wherein said first and said second amino acid sequences are contiguous and in a sequential order.

[0100] An isolated EPHA5_Skipping_exon_{—}16_#PEP_NUM_{—}59 polypeptide, comprising amino acid sequence being at least about 90% homologous to amino acids 1-886 of EPHA5, and a second amino acid sequence being at least about 70%, optionally at least about 80% preferably at least about 85%, more preferably at least about 90% and most preferably at least about 95% homologous to a polypeptide having the sequence SI, wherein said first and said second amino acid sequences are contiguous and in a sequential order.

[0101] An isolated polypeptide corresponding to a tail of EPHA5_Skipping_exon_{—}16_#PEP_NUM_{—}59, comprising a polypeptide having the sequence SI.

[0102] An isolated EPHA5_Skipping_exon_{—}4_#PEP_NUM_{—}54 polypeptide, comprising a first amino acid sequence being at least about 90% homologous to amino acids 1-303 of EPHA5, a bridging amino acid G and a second amino acid sequence being at least about 90-% homologous to amino acids 357-1037 of EPHA5, wherein said first amino acid sequence is contiguous to said bridging amino acid, and said second amino acid sequence is contiguous to said bridging amino acid, and wherein said first amino acid sequence, said bridging amino acid and said second amino acid sequence are in a sequential order.

[0103] An isolated polypeptide of an edge portion of EPHA5_Skipping_exon_{—}4_#PEP_NUM_{—}54, comprising a first amino acid sequence being at least about 90% homologous to amino acids 293-303 of EPHA5, a bridging amino acid G and a second amino acid sequence being at least about 90% homologous to amino acids 357-367 of EPHA5, wherein said first amino acid sequence is contiguous to said bridging amino acid and said second amino acid sequence is contiguous to said bridging amino acid, and wherein said first amino acid sequence, said bridging amino acid and said second amino acid sequence are in a sequential order.

[0104] An isolated EPHA5_Skipping_exon_{—}5_#PEP_NUM_{—}55 polypeptide, comprising a first amino acid sequence being at least 90% homologous to amino acids 1-355 of EPHA5, bridged by T and a second amino acid sequence being at least 90% homologous to amino acids 469-1037 of EPHA5, wherein said first amino acid is contiguous to said bridging amino acid and said second amino acid sequence, is contiguous to said bridging amino acid, and wherein said first amino acid, said bridging amino acid and said second amino acid sequence are in a sequential order.

[0105] An isolated polypeptide of an edge portion of EPHA5_Skipping_exon_{—}5_#PEP_NUM_{—}55, comprising a first amino acid sequence being at least 90% homologous to amino acids 345-355 of EPHA5, bridged by T and a second amino acid sequence being at least 90% homologous to amino acids 469-479 of EPHA5, wherein said first amino acid is contiguous to said bridging amino acid and said second amino acid sequence is contiguous to said bridging amino acid, and wherein said first amino acid, said bridging amino acid and said second amino acid sequence are in a sequential order.

[0106] An isolated polypeptide of an edge portion of EPHA5_Skipping_exon_{—}5_#PEP_NUM_{—}55, comprising a first amino acid sequence being at least about 90% homologous to amino acids 345-355 of EPHA4, a bridging amino acid T and a second amino acid sequence being at least about 90% homologous to amino acids 469-479 of EPHA5, wherein said first amino acid sequence is contiguous to said bridging amino acid and said second amino acid sequence is contiguous to said bridging amino acid, and wherein said first amino acid sequence, said bridging amino acid and said second amino acid sequence are in a sequential order.

[0107] An isolated EPHA5_Skipping_exon_{—}8_#PEP_NUM_{—}56 polypeptide, comprising a first amino acid sequence being at least about 90% homologous to amino acids 1-565 of EPHA5, and a second amino acid sequence being at least about 70%, optionally at least about 80%, preferably at least about 85%, more preferably at least about 90% and most preferably at least about 95% homologous to a polypeptide having the sequence IVAVGGLLPCALLPIQA (SEQ ID NO: 214), wherein said first and said second amino acid sequences are contiguous and in a sequential order.

[0108] An isolated polypeptide corresponding to a tail of EPHA5_Skipping_exon_{—}8_#PEP_NUM_{—}56, comprising a polypeptide having the sequence IVAVGGLLPCALLPIQA (SEQ ID NO: 214).

[0109] An isolated EPHA5_Skippingexon_{—}17_#PEP_NUM_{—}60 polypeptide, comprising a first amino acid sequence being at least about 90% homologous to amino acids 1-951 of EPHA5, and a second amino acid sequence being at least about 90% homologous to amino acids 1004-1037 of EPHA5, wherein said first and said second amino acid sequences are contiguous and in a sequential order.

[0110] An isolated polypeptide of an edge portion of EPHA5_Skippingexon_{—}17_#PEP_NUM_{—}60, comprising a first amino acid sequence being at least about 90% homologous to amino acids 941-951 of EPHA5, and a second amino acid sequence being at least about 90% homologous to amino acids 1004-1014 of EPHA5, wherein said first and said second amino acid sequences are contiguous and in a sequential order.

[0111] An isolated EPHA7_Skippingexon_{—}10_#PEP_NUM_{—}61 polypeptide, consisting essentially of an amino acid sequence being at least about 90% homologous to amino acids 1-599 of EPHA7.

[0112] An isolated EPHA7_Skippingexon_{—}15_#PEP_NUM_{—}62 polypeptide, comprising a first amino acid sequence being at least about 90% homologous to amino acids 1-844 of EPHA7, and a second amino acid sequence being at least about 70%, optionally at least about 80%, preferably at least about 85%, more preferably at least about 90% and most preferably at least about 95% homologous to a polypeptide having the sequence ANKPSSGSKHS (SEQ ID NO: 215), wherein said first and said second amino acid sequences are contiguous and in a sequential order.

[0113] An isolated polypeptide corresponding to a tail of EPHA7_Skippingexon_{—}15_#PEP_NUM_{—}62, comprising a polypeptide having the sequence ANKPSSGSKHS (SEQ ID NO: 215).

[0114] An isolated EPHB1_Skippingexon_{—}10_#PEP_NUM_{—}65 polypeptide, comprising a first namo acid sequence being at least about 90% homologous to amino acids 1-586 of EPHB1, and a second amino acid sequence being at least about 90% homologous to amino acids 628-984 of EPHB1, wherein said first and said second amino acid sequences are contiguous and in a sequential order.

[0115] An isolated polypeptide of an edge portion of EPHB1_Skippingexon_{—}10_#PEP_NUM_{—}65, comprising a first amino acid sequence being at least about 90% homologous to amino acids 576-586 of EPHB1, and a second amino acid sequence being at least about 90% homologous to amino acids 628-638 of EPHB1, wherein said first and said second amino acid sequences are contiguous and in a sequential order.

[0116] An isolated EPHB1_Skippingexon_{—}6_#PEP_NUM_{—}63 polypeptide, comprising a first amino acid sequence being at least about 90% homologous to amino acids 1-432 of EPHB1, and a second amino acid sequence being at least about 70%, optionally at least about 80%, preferably at least about 85%, more preferably at least about 90% and most preferably at least about 95% homologous to a polypeptide having the sequence GTG, wherein said first and said second amino acid sequences are contiguous and in a sequential order.

[0117] An isolated polypeptide corresponding to a tail of EPHB1_Skippingexon_{—}6_#PEP_NUM_{—}63, comprising a polypeptide having the sequence GTG.

[0118] An isolated EPHB1_Skippingexon_{—}8_#PEP_NUM_{—}64 polypeptide, comprising a first amino acid sequence at least about 90% homologous to amino acids 1-528 of EPHB1, and a second amino acid sequence being at least about 70%, optionally at least about 80%, preferably at least about 85%, more preferably at least about 90% and most preferably at least about 95% homologous to a polypeptide having the sequence GNGLIAKRLCTAISSSITAQAEGSLEKCTRGV (SEQ ID NO: 216), wherein said first and said second amino acid sequences are contiguous and in a sequential order.

[0119] An isolated polypeptide corresponding to a tail of EPHB1_Skippingexon_{—}8_#PEP_NUM_{—}64, comprising polypeptide having the sequence GNGLIAKRLCTAISSSITAQAEGSLEKCTRGV (SEQ ID NO: 216).

[0120] An isolated ErbB2_Skippingexon_{—}6_#PEP_NUM_{—}76 polypeptide, comprising a first amino acid sequence being at least about 90% homologous to amino acid 1-214 of ErbB2 and a second amino acid sequence being at lest about 70%, optionally at least about 80%, preferably at least about 85%, more preferably at least about 90% and most preferably at least about 95% homologous to a polypeptide having the sequence RLPPLQPQWHL (SEQ ID NO: 217), wherein said first and said second amino acid sequences are contiguous and in a sequential order.

[0121] An isolated polypeptide corresponding to a tail of ErbB2_Skippingexon_{—}6_#PEP_NUM_{—}76, comprising a polypeptide having the sequence RLPPLQPQWHL (SEQ ID NO: 217).

[0122] An isolated ErbB3_Skippingexon_#PEP_NUM_{—}78 polypeptide, consisting essentially of an amino acid sequence being at least 90% homologous to amino acids 1-468 of ErbB3, followed by V.

[0123] An isolated ErbB3 Skippingexon_{—}18_#PEP_NUM_{—}79 polypeptide comprising a first amino acid sequence being at least about 90% homologous to amino acids 1-685 of ErbB3, and a second amino acid sequence being at least about 90% homologous to amino acids 726-1342 of ErbB3, wherein said first and said second amino acid sequences are contiguous and in sequential order.

[0124] An isolated polypeptide of an edge portion of ErbB3_Skippingexon_{—}18_#PEP_NUM_{—}79, comprising a first amino acid sequence being at least about 90% homologous to amino acids 675-685 of ErbB3, and a second amino acid sequence being at least about 90% homologous to amino acids 726-736 of ErbB3, wherein said first and said second amino acid sequences are contiguous and in a sequential order.

[0125] An isolated ErbB3_Skippingexon_{—}4_#PEP_NUM_{—}77 polypeptide, comprising a first amino acid sequence being at least about 90% homologous to amino acids 1-140 of ErbB3, a bridging amino acid G and a second amino acid sequence being at least about 90% homologous to amino acids 174-1342 of ErbB3, wherein said first amino acid sequence is contiguous to said bridging amino acid and said second amino acid sequence is contiguous to said bridging amino acid, and wherein said first amino acid sequence, said bridging amino acid and said second amino acid sequence are in a sequential order.

[0126] An isolated polypeptide of an edge portion of ErbB3_Skippingexon_{—}4_#PEP_NUM_{—}77, comprising a first amino acid sequence being at least about 90% homologous to amino acids 130-140 of ErbB3, a bridging amino acid G and a second amino acid sequence being at least about 90% homologous to amino acids 174-184 of ErbB3, wherein said first amino acid sequence is contiguous to said bridging amino acid and said second amino acid sequence is contiguous to said bridging amino acid, and wherein said first amino acid sequence, said bridging amino acid and said second amino acid sequence are in a sequential order.

[0127] An isolated ErbB4_Skippingexon_{—}14_#PEP_NUM 80 polypeptide, comprising a first amino acid sequence being at least about 90% homologous to amino acids 1-541 of ErbB4, and a second amino acid sequence being at least about 70%, optionally at least about 80%, preferably at least about 85%, more preferably at least about 90% and most preferably at least about 95% homologous to a polypeptide having the sequence VLTTVQSALILKMAQTVWKNVQMAYRGQTVSFSSMLIQIGSATHAIQTAPKG VTVPLVMTAFTHGRAIPLYHNMLELP (SEQ ID NO: 218), wherein said firsthand said second amino acid sequences are contiguous and in a sequential order.

[0128] An isolated polypeptide corresponding to a tail of ErbB4_Skippingexon_{—}14_#PEP_NUM_{—}80, comprising a polypeptide having the sequence VLTTVQSALILKMAQTVWKNVQMAYRGQTVSFSSMLIQIGSATHAIQTAPKG VTVPLVMTAFTHGRAIPLYHNMLELP (SEQ ID NO: 218).

[0129] An isolated “ErbB4_Skippingexon_{—}16_#PEP_NUM_{—}81 polypeptide, comprising a first amino acid sequence being at least about 90% homologous to amino acids 1-624 of ErbB4, and a second amino acid sequence being at least about 90% homologous to amino acids 650-1308 of ErbB4, wherein said first and said second amino acid sequences are contiguous and in a sequential order.

[0130] An isolated polypeptide of an edge portion of ErbB4_Skippingexon_{—}16_#PEP_NUM_{—}81, comprising a first amino acid sequence being at least about 90% homologous to amino acids 614-624 of ErbB4, and a second amino acid sequence being at least about 90% homologous to amino acids 650-660 of ErbB4, wherein said first and said second amino acid sequences are contiguous and in a sequential order.

[0131] An isolated FGF10_Skippingexon_{—}2_#PEP_NUM_{—}114 polypeptide, comprising a first amino acid sequence being at least about 90% homologous to amino acids 1-108 of FGF10, and a second amino acid sequence being at least about 70%, optionally at least about, 80%, preferably at least about 85%, more preferably at least about 90% and most preferably at least about 95% homologous to a polypeptide having the sequence KRI, wherein said first and said second amino acid sequences are contiguous and in a sequential order.

[0132] An isolated polypeptide corresponding to a tail of FGF10_Skippingexon_{—}2_#PEP_NUM_{—}114, comprising a polypeptide having the sequence KRI.

[0133] An isolated FGF11_Skipping_exon_{—}2_#PEP_NUM_{—}37 polypeptide, comprising a first amino acid sequence being at least about 90% homologous to amino acids 1-64 of FGF11, a bridging amino acid A and a second amino acid sequence being at least about 90% homologous to amino acids 101-225 of FGF11, wherein said first amino acid sequence is contiguous to said bridging amino acid and said second amino acid sequence is contiguous to said bridging amino acid, and wherein said first amino acid sequence, said bridging amino acid and said second amino acid sequence are in a sequential order.

[0134] An isolated polypeptide of an edge portion, of FGF11_Skipping_exon_{—}2_#PEP_NUM_{—}37, comprising a first amino acid sequence being at least about 90% homologous to amino acids 54-64 of FGF11, a bridging amino acid A and a second amino acid sequence being at least about 90% homologous to amino acids 101-111 of FGF11, wherein said first amino acid sequence is contiguous to said bridging amino acid and said second amino acid sequence is contiguous to said bridging amino acid, and wherein said first amino acid sequence, said bridging amino acid and said second amino acid sequence are in a sequential order.

[0135] An isolated FGF12_Skipping_exon_{—}2_Short_isoform_#PEP_NUM_{—}39 polypeptide, comprising a first amino acid sequence being at least about 90% homologous to amino acids 1-4 of FGF12_Short_isoform, a bridging amino acid A and a second amino acid sequence being at least about 90% homologous to amino acids 43-181 of FGF12 Short isoform, wherein said first amino acid sequence is contiguous to said bridging amino acid and said second amino acid sequence is contiguous to said bridging amino acid, and wherein said first amino acid sequence, said bridging amino acid and said second amino acid sequence are in a sequential order.

[0136] An isolated polypeptide of an edge portion of FGF12_Skipping_exon_{—}2_Short_isoform_#PEP_NUM_{—}39, comprising a first amino acid sequence being at least about 90% homologous to amino acids 1-4 of FGF12_Short_isoform, a bridging amino acid A and a second amino acid sequence being at least about 90% homologous to amino acids 43-53 of FGF12_Short_isoform, wherein said first amino acid sequence is contiguous to said bridging amino acid and said second amino acid sequence is contiguous to said bridging amino acid, and wherein said first amino acid sequence, said bridging amino acid and said second amino acid sequence are in a sequential order.

[0137] An isolated FGF12_Skipping_exon_{—}2_long_isoform_#PEP_NUM_{—}38 polypeptide, comprising a first amino acid sequence being at least about 90% homologous to amino acids 1-66 of FGF12_Long_isoform, a bridging amino acid A and a second amino acid sequence being at least about 90% homologous to amino acids 105-243 of FGF12_Long_isoform, wherein said first amino acid sequence is contiguous to said bridging amino acid and said second amino acid sequence is contiguous to said bridging amino acid, and wherein said first amino acid sequence, said bridging amino acid and said second amino acid sequence are in a sequential order.

[0138] An isolated polypeptide of an edge portion of FGF12_Skipping_exon_{—}2_long_isoform_#PEP_NUM_{—}38, comprising a first amino acid sequence beings at least about 90. % homologous to amino acids 56-66 of FGF12_Long_isoform, a bridging amino acid A and a second amino acid sequence being at least about 90%, homologous to amino acids 105-115 of FGF12_Long_isoform, wherein said first amino acid sequence is contiguous to said bridging amino acid and said second amino acid sequence is contiguous to said bridging amino acid, and wherein said first amino acid sequence, said bridging amino acid and said second amino acid sequence are in a sequential order.

[0139] An isolated FGF13_Skipping_exon_{—}2_Long_isoform_#PEP_NUM_{—}40 polypeptide, comprising a first amino acid sequence being at least about 90% homologous to amino acids 1-62 of FGF13_Long_isoform, a bridging amino acid A and a second amino acid sequence being at least about 90% homologous to amino acids 101-245 of FGF13_Long_isoform, wherein said first amino acid sequence is contiguous to said bridging amino acid and said second amino acid sequence is contiguous to said bridging amino acid, and wherein said first amino acid sequence, said bridging amino acid and said second amino acid sequence are in a sequential order.

[0140] An isolated polypeptide of an edge portion of FGF13_Skipping_exon_{—}2_Long_isoform_#PEP_NUM_{—}40, comprising a first amino acid sequence being at least about 90% homologous to amino acids 52-62 of FGF12_Long_isoform, a bridging amino acid A and a second amino acid sequence being at least about 90% homologous to amino acids 101-115 of FGF13_Long_isoform, wherein said first amino acid sequence is contiguous to said bridging amino acid and said second amino acid sequence is contiguous to said bridging amino acid, and wherein said first amino acid sequence, said bridging amino acid and said second amino acid sequence are in a sequential order.

[0141] An isolated FGF13_Skipping_exon_{—}3_Long_isoform_#PEP_NUM_{—}41 polypeptide, comprising a first amino acid sequence being at least about 90% homologous to amino acids 1-99 of FGF13_Long_isoform, and a second amino acid sequence being at least about 70%, optionally at least about 80%, preferably at least about 85%, more preferably at least about 90% and most preferably at least about 95% homologous to a polypeptide having the sequence RTFHT, wherein said first and said second amino acid sequences are contiguous and in a sequential order.

[0142] An isolated polypeptide corresponding to a tail of FGF13_Skipping_exon_{—}3_Long_isoform_#PEP_NUM_{—}41, comprising a polypeptide having the sequence RTFHT.

[0143] An isolated. FGF13_Skipping_exon_{—}2_Short_isoform_#PEP_NUM_{—}40a polypeptide, comprising a first amino acid sequence being at least about 90% homologous to amino acids 1-9 of FGF13_Short_isoform, a bridging amino acid A and a second amino acid sequence being at least about 90% homologous to amino acids 48-192 of FGF13_Short_isoform, wherein said first amino acid sequence is contiguous to said bridging amino acid and said second amino acid sequence is contiguous to said bridging amino acid, and wherein said first amino acid sequence, said bridging amino acid and said second amino acid sequence are in a sequential order.

[0144] An isolated polypeptide of an edge portion of FGF13_Skipping_exon_{—}2_Short_isoform_#PEP_NUM_{—}40a, comprising a first amino acid sequence being at least about 90% homologous to amino acids 1-9 of FGF13_Short_isoform, a bridging amino acid A and a second amino acid sequence being at least about 90% homologous to amino acids 48-58 of FGF13_Short_isoform, wherein said first amino acid sequence is contiguous to said bridging amino acid and said second amino acid sequence is contiguous to said bridging amino acid, and wherein said first amino acid sequence, said bridging amino acid and said second amino acid sequence are in a sequential order.

[0145] An isolated FGF13_Skipping_exon_{—}3_Short isoform_#PEP_NUM_{—}41a polypeptide, comprising a first amino acid sequence being at least about 90% homologous to amino acids 1-46 of FGF13_Short_isoform, and a second amino acid sequence being at least about 70%, optionally at least about 80%, preferably at least about 85%, more preferably at least about 90% and most preferably at least about 95% homologous to a polypeptide having the sequence RTFHT (SEQ ID NO: 219), wherein said first and said second amino acid sequences are contiguous and in a sequential order.

[0146] An isolated polypeptide corresponding to a tail of FGF13_Skipping_exon_{—}3_Short_isoform_#PEP_NUM_{—}41a, comprising a polypeptide having the RTFHT (SEQ ID NO: 219).

[0147] An isolated FGF18_Skipping_exon_{—}2_#PEP_NUM_{—}115 polypeptide, comprising a first amino acid sequence being at least about 90% homologous to amino acids 1-12 of FGF18, and a second amino acid sequence being at least about 70%, optionally at least about 80%, preferably at least about 85%, more preferably at least about 90% and most preferably at least about 95% homologous to a polypeptide having the sequence WLPRRTWTSAASTWRTRRGLGTM (SEQ ID NO: 220), wherein said first and said second amino acid sequences are contiguous and in a sequential order.

[0148] An isolated polypeptide corresponding to a tail of FGF18_Skippingexon_{—}2_#PEP_NUM_{—}115, comprising a polypeptide having the sequence WLPRRTWTSAASTWRTRRGLGTM (SEQ ID NO: 220).

[0149] An isolated FGF18_Skippingexon_{—}4_#PEP_NUM_{—}116 polypeptide, comprising a first amino acid sequence being at least about 90% homologous to amino acids 1-84 of FGF18, and a second amino acid sequence being at least about 70%, optionally at least about 80%, preferably at least about 85%, more preferably at least about 90% and most preferably at least about 95% homologous to a polypeptide having the sequence RWHQQGVWVHREGSGEQLHGPDVG (SEQ ID NO: 221), wherein said first and said second amino acid sequences are contiguous and in a sequential order.

[0150] An isolated polypeptide corresponding to a tail of FGF18_Skippingexon_{—}4_#PEP_NUM_{—}116, comprising a polypeptide having the sequence RWHQQGVWVHREGSGEQLHGPDVG (SEQ ID NO: 221).

[0151] An isolated FGF9_Skippingexon_{—}2_#PEP_NUM_{—}113 polypeptide, comprising a first amino acid sequence being at least about 90% homologous to amino acids 1-93 of FGF9, and a second amino acid sequence being at least about 70%, optionally at least about 80%, preferably at least about 85%, more preferably at least about 90% and most preferably at least about 95% homologous to a polypeptide having the sequence KTNPRVCIQRTVRRKLV (SEQ ID NO: 222), wherein said first and said second amino acid sequences are contiguous and in a sequential order.

[0152] An isolated polypeptide corresponding to a tail of FGF9_Skippingexon_{—}2_#PEP_NUM_{—}113, comprising a polypeptide having the sequence KTNPRVCIQRTVRRKLV (SEQ ID NO: 222).

[0153] An isolated FSHR_Intron_{—}7 retention_#PEP_NUM_{—}28 polypeptide, consisting essentially of an amino acid sequence being at least about 90% homologous to amino acids 1-198 of FSHR.

[0154] An isolated FSHR_Skipping exon_{—}7_#PEP_NUM_{—}26 polypeptide, comprising a first amino acid sequence being at least about 90% homologous to amino acids 1-174 of FSHR, and a second amino acid sequence being at least about 90% homologous to amino acids 198-695 of FSHR, wherein said first and said second amino acid sequences are contiguous and in a sequential order.

[0155] An isolated polypeptide of an edge portion of FSHR_Skipping_exon_{—}7_#PEP_NUM_{—}26, comprising a first amino acid sequence being at least about 90% homologous to amino acids 164-174 of FSHR, and a second amino acid sequence being at least about 90% homologous to amino acids 198-208 of FSHR, wherein said first and said second amino acid sequences are contiguous and in a sequential order.

[0156] An isolated FSHR_Skipping_exon_{—}8_#PEP_NUM_{—}27 polypeptide, comprising a first amino acid sequence being at least about 90% homologous to amino acids 1-197 of FSHR, and a second amino acid sequence being at least about 90% homologous to amino acids 223-695 of FSHR, wherein said first and said second amino acid sequences are contiguous and in a sequential order.

[0157] An isolate polypeptide of an edge portion of FSHR_Skipping_exon_{—}8_#PEP_NUM_{—}27, comprising a first amino acid sequence being at least about 90% homologous to amino acids 187-197 of FSHR, and a second amino acid sequence being at least about 90% homologous to amino acids 223-233 of FSHR, wherein said first and said second amino acid sequences are contiguous and in a sequential order.

[0158] An isolated FSHR_with_Novel_exon_{—}8A_#PEP_NUM_{—}29 polypeptide comprising a first amino acid sequence being at least about 90% homologous to amino acids 1-223 of FSHR, an amino acid sequence being at least about 70%, optionally at least about 80%, preferably at least about 85%, more preferably at least about 90% and most preferably at least about 95% homologous to a bridging polypeptide having the sequence NRRTRTPTEPNVLLAKYPSGQGVLEEPESLSSSI (SEQ ID NO: 223), and a second amino acid sequence being at least about 90% homologous to amino acids 224-695 of FSHR, wherein said first amino acid sequence is contiguous to said bridging polypeptide and said second amino acid sequence is contiguous to said bridging polypeptide, and wherein said first amino acid, said bridging polypeptide and said second amino acid sequence are in a sequential order.

[0159] An isolated polypeptide of an edge portion of FSHR_with_Novel_exon_{—}8A_#PEP_NUM_{—}29, comprising an amino acid sequence of NRRTRTPTEPNVLLAKYPSGQGVLEEPESLSSSI (SEQ ID NO: 223).

[0160] An isolated GFRA1_Skippingexon_{—}4_#PEP_NUM_{—}107 polypeptide comprising a first amino acid sequence being at least about 90% homologous to amino acids 1-111 of GFRA1, and a second amino acid sequence being at least about 90% homologous to amino acids 140-465 of GFRA1, wherein said first and said second amino acid sequences are contiguous and in a sequential order.

[0161] An isolated polypeptide of an edge portion of GFRA1_Skipping_exon_{—}4_#PEP_NUM_{—}107, comprising a first amino acid sequence being at least about 90% homologous to amino acids 101-111 of GFRA1, and a second amino acid sequence being at least about 990% homologous to amino acids 140-150 of GFRA1, wherein said first and said second amino acid sequences are contiguous and in a sequential order.

[0162] An isolated GFRA2_Skippingexon_{—}3_#PEP_NUM_{—}108 polypeptide, consisting essentially of an amino acid sequence being at least about 90% homologous to amino acids 1-60 of GFRA2.

[0163] An isolated HSFLT_Skipping_exon_{—}19_#PEP_NUM_{—}8 polypeptide, comprising a first amino acid sequence being at least 90% homologous to amino acids 1-864 of HSFLT, and a second amino acid sequence being at least 90% homologous to amino acids 903-1338 of HSFLT or a portion thereof, wherein said first and said second amino acid sequences are contiguous and in a sequential order.

[0164] An isolated polypeptide of an edge portion of HSFLT_Skipping_exon_{—}19_#PEP_NUM_{—}8, comprising a first amino acid sequence being at least 90% homologous to amino acids 854-864 of HSFLT or a portion thereof, and a second amino acid sequence being at least 90% homologous to amino acids 903-913 of HSFLT or a portion thereof, wherein said first and said second amino acid sequences are contiguous and in a sequential order.

[0165] An isolated Heparanase2_Skippingexon_{—}10_#PEP_NUM_{—}146 polypeptide, comprising a first amino acid sequence being at least about 90% homologous to amino acids 1-440 of Heparanase2, and a second amino acid sequence being at least about 70%, optionally at least about 80%, preferably at least about 85%, more preferably at least about 90% and most preferably at least about 95% homologous to a polypeptide having the sequence PQLRSWVHYTFYHQLASIKKENQAGWDSQRQAGSPVPAAALWAGGPKVQV SATEWPALSDGGRRDPPRIEAPPPSGRPDIGHPSSHHGLLCGQECQCFGLPLPIS YPHTHGYQWACWAASTPPLQ (SEQ ID NO: 224), wherein said first and said second amino acid sequences are contiguous and in a sequential order.

[0166] An isolated polypeptide corresponding to a tail of Heparanase2_Skipping_exon_{—}10_#PEP_NUM_{—}146, comprising a polypeptide having the sequence PQLRSWVHYTFYHQLASIKKENQAGWDSQRQAGSPVPAAALWAGGPKVQV SATEWPALSDGGRRDPPRIEAPPPSGRPDIGHPSSHHGLLCGQECQCFGLPLPIS YPHTHGYQWACWAASTPPLQ (SEQ ID NO: 224).

[0167] An isolated Heparanase2_Skippingexon_{—}11_#PEP_NUM_{—}147 polypeptide, comprising a first amino acid sequence being at least about 90% homologous to amino acids 1-489 of Heparanase2, and a second amino acid sequence being at least about 90% homologous to amino acids 538-592 of Heparanase2, wherein said first and said second amino acid sequences are contiguous and in a sequential order.

[0168] An isolated polypeptide of an edge portion of Heparanase2_Skippingexon_{—}11_#PEP_NUM_{—}147, comprising a first amino acid sequence being at least about 90% homologous to amino acids 479-489 acid Heparanase2, and a second amino acid sequence being a at least about 90 homologous to amino acids 538-548 of Heparanase2, wherein said first and said second amino acid sequences are contiguous and in a sequential order.

[0169] An isolated Heparanase2_Skippingexon_{—}5_#PEP_{—}141 polypeptide, comprising a first amino acid sequence being at least about 90% homologous to amino acids 1-261 of Heparanase2, and a second amino acid sequence being at least about 90% homologous to amino acids 395-396 of Heparanase2, wherein said first and said second amino acid” sequences are contiguous and in a sequential order.

[0170] An isolated polypeptide of an edge portion of Heparanase2_Skippingexon_{—}5_#PEP_NUM_{—}141, comprising a first amino acid sequence being at least about 90% homologous to amino acids 251-261 of Heparanase2, and a second amino acid sequence being at least about 90% homologous to amino acids 395-396 of Heparanase2, wherein said first and said second amino acid sequences are contiguous and in a sequential order.

[0171] An isolated Heparanase2_Skippingexon_{—}6_#PEP_NUM_{—}142 polypeptide, comprising a first amino acid sequence being at least about 90% homologous to amino acids 1-3119 of Heparanase2, and a second amino acid sequence being at least about 90% homologous to amino acids 335-592 of Heparanase2, wherein said first and said second amino acid sequences are contiguous and in a sequential order.

[0172] An isolated polypeptide of an edge portion of Heparanase2_Skippingexon_{—}6_#PEP_NUM_{—}142, comprising a first amino acid sequence being at least about 90% homologous to amino acids 309-319 of Heparanase2, and a second amino acid sequence being at least about 90% homologous to amino acids 335-345 of Heparanase2, wherein said first and said second amino acid sequences are contiguous and in a sequential order.

[0173] An isolated Heparanase2_Skippingexon_{—}7_#PEP_NUM_{—}143 polypeptide, comprising a first amino acid sequence being at least about 90% homologous to amino acids 1-334 of Heparanase2, and a second amino acid sequence being at least about 70%, optionally at least about 80%, preferably at least about 85%, more preferably at least about 90% and most preferably at least about 95% homologous to a polypeptide having the sequence QWLIHTLQERRFGLKVW: (SEQ ID NO: 225), wherein said first and said second amino acid sequences are contiguous and in a sequential order.

[0174] An isolated polypeptide corresponding to a tail of Heparanase2_Skippingexon_{—}7_#PEP_NUM_{—}143, comprising a polypeptide having the sequence QWLIHTLQERRFGLKVW (SEQ ID NO: 225).

[0175] An isolated Heparanase2_Skippingexon_{—}8_#PEP_NUM_{—}144 polypeptide, comprising a first amino acid sequence being at least about 90% homologous to amino acids 1-366 of Heparanase2, and a second amino acid sequence being at least about 70%, optionally at least about 80%, preferably at least about 85%, more preferably at least about 90% and most preferably at least about 95% homolgous to a polypeptide having the sequence MVEHFIRIAGQSGH (SEQ ID NO: 226), wherein said first and said second amino acid sequences are contiguous and in a sequential order.

[0176] An isolated polypeptide corresponding to a tail of Heparanase2_Skippingexon_{—}8_#PEP_NUM_{—}144, comprising a polypeptide having the sequence MVEHFRIAGQSGH (SEQ ID NO: 226).

[0177] An isolated Heparanase2_Skippingexon_{—}9_#PEP_NUM_{—}145 polypeptide, comprising a first amino acid sequence being at least about 90% homologous to amino acids 1-401 of Heparanase2, and a second amino acid sequence being at least about 70%, optionally at least about 80%, preferably at least about 85%, more preferably at least about 90% and most preferably at least about 95% homologous to a polypeptide having the sequence TTGSLSSTSA (SEQ ID NO: 227), wherein said first and said second amino acid sequences are contiguous and in a sequential order.

[0178] An isolated polypeptide corresponding to a tail of Heparanase2_Skippingexon_{—}9_#PEP_NUM_{—}145, comprising a polypeptide having the sequence TTGSLSSTSA (SEQ ID NO: 227).

[0179] An isolated Heparanase_Skipping_exon_{—}10_#PEP_NUM_{—}140 polypeptide, comprising a first amino acid sequence being at least 90% homologous to amino acids 1-364 of Heparanase, and a second amino acid sequence being at least, 70%, optionally at least 80%, preferably at least 85%, more preferably at least 90% and most preferably at least 95% homologous to a polypeptide having the sequence IIGYLFCSRNWWAPRC, wherein said first and said second amino acid sequences are contiguous and in a sequential order.

[0180] An isolated polypeptide corresponding to a tail of Heparanase_Skipping_exon_{—}10_#PEP_NUM_{—}140, comprising a polypeptide having the sequence IIGYLFCSRNWWAPRC.

[0181] An isolated IGFBP4_Skippingexon_{—}3_#PEP_NUM_{—}111 polypeptide, comprising a first amino acid sequence being at least 90% homologous to amino acids 1-169 of IGFBP4, and a second amino acid sequence being at least 90% homologous to amino acids 215-258 of IGFBP4 or a portion thereof, wherein said first and said second amino acid sequences are contiguous and infra sequential order.

[0182] An isolated polypeptide of an edge portion of IGFBP4_Skippingexon_{—}3_#PEP_NUM_{—}111, comprising a first amino acid sequence being at least 90% homologous to amino acids 159-169 of IGFBP4 or a portion thereof, and a second amino acid sequence being at least 90% homologous to amino acids 215-225 of IGFBP4 or a portion thereof, wherein said first and said second amino acid sequences are contiguous and in a sequential order.

[0183] An isolated IL16_Long_Skippingexon_{—}18_#PEP_NUM_{—}110 polypeptide, comprising a first amino acid sequence being at least about 90% homologous to amino acids 1-1060 of IL16, and a second amino acid sequence being at least about 90% homologous to amino acids 1095-1244 of IL16, wherein said first and said second amino acid sequences are contiguous and in a sequential order.

[0184] An isolated polypeptide of an edge portion of IL16_Long_Skippingexon_{—}18_#PEP_NUM_{—}110, comprising a first amino acid sequence being at least about 90% homologous to amino acids 1050-1060 of IL16, and a second amino acid sequence being at least about 90% homologous to amino acids 1095-1105 of IL16, wherein said first and said second amino acid sequences are contiguous and in a sequential order.

[0185] An isolated IL16_Long_Skippingexon_{—}5_#PEP_NUM_{—}109 polypeptide, comprising a first amino acid sequence being at least about 90% homologous to amino acids 1-103 of IL16, and a second amino acid sequence being at least about 70%, optionally at least about 80, preferably at least about 85%, more preferably at least about 90% and most preferably at least about 95% homologous to a polypeptide having the sequence VLIPIAQEKLIFQ (SEQ ID NO: 228), wherein said first and said second amino acid sequences are contiguous and in a sequential order.

[0186] An isolated polypeptide corresponding to a tail of IL16_Long_Skippingexon_{—}5_#PEP_NUM_{—}109, comprising a polypeptide having the sequence VLIPIAQEKLIFQ (SEQ ID NO: 228).

[0187] An isolated IL18R_Skippingexon_{—}9_#PEP_NUM_{—}164 polypeptide, comprising a first amino acid sequence being at least about 90% homologous to amino acids 1-370 of IL18R, and a second amino acid sequence being at least about 90% homologous to amino acids 424-541 of IL18R, wherein said first and said second amino acid sequences are contiguous and in a sequential order.

[0188] An isolated polypeptide of an edge portion of IL18R_Skippingexon_{—}9_#PEP_NUM_{—}164, comprising a first amino acid sequence being at least about 90% homologous to amino acids 360-370 of IL18R, and % a second amino acid sequence being at least about 90% homologous to amino acids 424-434 of IL18R, wherein said first and said second amino acid sequences are contiguous and in a sequential order.

[0189] An isolated IL1RAPL1_Skippingexon_{—}4_#PEP_NUM_{—}170 polypeptide, comprising a first amino acid sequence being at least about 90% homologous to amino acids 1-122 of IL1RAPL1, and a second amino acid sequence being at least about 70%, optionally at least about 80%, preferably at least about 85%, more preferably at least about 90% and most preferably at least about 95% homologous to a polypeptide having the sequence AGQKHGGQVLYSKEILCL (SEQ ID NO: 229), wherein said first and said second amino acid sequences are contiguous and fin a sequential order.

[0190] An isolated polypeptide corresponding to a tail of IL1RAPL1_Skippingexon_{—}4_#PEP_NUM_{—}170, comprising a polypeptide having the sequence AGQKHGGQVLYSKEILCL (SEQ ID NO: 229).

[0191] An isolated IL1RAPL1_Skippingexon_{—}5_#PEP_NUM_{—}171 polypeptide, comprising a first amino acid sequence being at least about 90% homologous to amino acids 1-183 of IL1RAPL1, and a second amino acid sequence being at least about 90% homologous to amino acids 236-237 of IL1RAPL1, Wherein said first and said second amino acid sequences are contiguous and in a sequential order.

[0192] An isolated polypeptide of an edge portion of IL1RAPL1_Skippingexon_{—}5_#PEP_NUM_{—}171, comprising a first amino acid sequence being at least about 90% homologous to amino acids 173-183 of IL1RAPL1, and a second amino acid sequence being at least about 90% homologous to amino acids 236-246 of IL1RAPL1, wherein said first and said second amino acid sequences are contiguous and in a sequential order.

[0193] An isolated IL1RAPL1_Skippingexon_{—}6_#PEP_NUM_{—}172 polypeptide, comprising a first amino acid sequence being at least about 90% homologous to amino acids 1-234 of IL1RAPL1, and a second amino acid sequence being at least about 90% homologous to amino acids 260-696 of IL1RAPL1, wherein said first and said second amino acid sequences are contiguous and in a sequential order.

[0194] An isolated polypeptide of an edge portion of IL1RAPL1_Skippingexon_{—}6_#PEP_NUM_{—}172, comprising a first amino acid sequence being at least about 90% homologous to amino acids 224-234 of IL1RAPL1, and a second amino acid sequence being at least about 90% homologous to amino acids 260-270 of IL1RAPL1, wherein said first and said second amino acid sequences are contiguous and in a sequential order.

[0195] An isolated IL1RAPL1_Skippingexon_{—}7_#PEP_NUM_{—}173 polypeptide, comprising a first amino acid sequence being at least about 90% homologous to amino acids 1-259 of IL1RAPL1, and a second amino acid sequence being at least about 70%, optionally at least about 80%, preferably at least about 85%, more preferably at least about 90% and most preferably at least about 95% homologous to a polypeptide having the sequence EFLRSILGNRKFPSH (SEQ ID NO: 230), wherein said first and said second amino acid sequences are contiguous and in a sequential order.

[0196] An isolated polypeptide corresponding to a tail of IL1RAPL1_Skippingexon_{—}7_#PEP_NUM_{—}173, comprising a polypeptide having the sequence EFLRSILGNRKFPSH (SEQ ID NO: 230).

[0197] An isolated IL1RAPL1_Skippingexon_{—}8_#PEP_NUM_{—}174 polypeptide, comprising a first amino acid sequence being at least about 90% homologous to amino acids 1-304 of IL1RAPL1, and a second amino acid sequence being at least about 70%, optionally at least about 80%, preferably at least about 85%, more preferably at least about 90% and most preferably at least about 95% homologous to a polypeptide having the sequence ANVHSGTCCRPCCYSCCLYVW (SEQ ID NO: 231), wherein said first and said second amino acid sequences are contiguous and in a sequential order.

[0198] An isolated polypeptide corresponding to a tail of IL1RAPL1_Skippingexon_{—}8_#PEP_NUM_{—}174, comprising a polypeptide having the sequence ANVHSGTCCRPCCYSCCLYVW (SEQ ID NO: 231).

[0199] An isolated IL1RAPL12_Skippingexon_{—}4_#PEP_NUM_{—}175 polypeptide, comprising a first amino acid sequence at least about 90% homologous to amino acids 1-120 of IL1RAPL2, and a second amino acid sequence being at least about 70%, optionally at least about 80%, preferably at least about 85%, more preferably at least about 90% and most preferably at least about 95% homologous to a polypeptide having the sequence ASQKCGEA (SEQ ID NO: 232), wherein said first and said second amino acid sequences are contiguous and in a sequential order.

[0200] An isolated polypeptide corresponding to a tail of IL1RAPL2_Skippingexon_{—}4_#PEP_NUM_{—}175, comprising a polypeptide having the sequence ASQKCGEA (SEQ ID NO: 232).

[0201] An isolated IL1RAPL2_Skippingexon_{—}5_#PEP_NUM_{—}176 polypeptide, comprising a first amino acid sequence being at least about 90% homologous to amino acids 1-181 of IL1RAPL2, and a second amino acid sequence being at least about 70%, optionally at least about 80%, preferably at least about 85%, more preferably at least about 90% and most preferably at least about 95% homologous to a polypeptide having the sequence LYSQTSLPSHCSPWRISQVL (SEQ ID NO: 233), wherein said first and said second amino acid sequences are contiguous and in a sequential order.

[0202] An isolated polypeptide corresponding to a tail of IL1RAPL2_Skippingexon_{—}5_#PEP_NUM_{—}176, comprising a polypeptide having the sequence LYSQTSLPSHCSPWRISQVL (SEQ ID NO: 233).

[0203] An isolated IL1RAPL2_Skippingexon_{—}6_#PEP_NUM_{—}177 polypeptide, comprising a first amino acid sequence being at least about 90% homologous to amino acids 1-232 of IL1RAPL2, and a second amino acid sequence being at least about 90% homologous to amino acids 258-686 of IL1RAPL2, wherein said first and said second amino acid sequences are contiguous and in a sequential order.

[0204] An isolated, polypeptide of an edge portion of IL1RAPL2_Skippingexon_{—}6_#PEP_NUM_{—}177, comprising a first amino acid, sequence being at least about 90% homologous to amino acids 222-232 of IL1RAPL2, and a second amino acid sequence being least about 90% homologous to amino acids 258-268 of IL1RAPL2, wherein said first and said second amino acid sequences are contiguous and in a sequential order.

[0205] An isolated IL1RAPL2_Skippingexon_{—}7_#PEP_NUM_{—}178 polypeptide, comprising a first amino acid sequence being at least about 90% homologous to amino acids 1-258 of IL1RAPL2, and a second amino acid sequence being at least about 70%, optionally at least about 80% preferably at least about 85%, more preferably at least about 90% and most preferably at least about 95% homologous to a polypeptide having the sequence FSKSILEKKKLNWHSSLTQLWKLTWRIIPAMLKTEMDGNMPVFCCVKRI (SEQ ID NO: 234), wherein said first and said second amino acid sequences are contiguous and in a sequential order.

[0206] An isolated polypeptide corresponding to a tail of IL1RAPL2_Skippingexon_{—}7_#PEP_NUM_{—}178, comprising a polypeptide having the sequence FSKSILEKKKLNWHSSLTQLWKLTWRIIPAMLKTEMDGNMPVFCCVKRI (SEQ ID NO: 234).

[0207] An isolated IL1RAPL2_Skippingexon_{—}8_#PEP_NUM_{—}179 polypeptide, comprising a first amino acid sequence being at least about 90% homologous to amino acids 1-301 of IL1RAPL2, and a second amino acid sequence being at least about 70%, optionally at least about 80%, preferably at least about 85%, more preferably at least about 90% and most preferably at least about 95% homologous to a polypeptide having the sequence FNL, wherein said first and said second amino acid sequences are contiguous and in a sequential order.

[0208] An isolated polypeptide corresponding to a tail of IL1RAPL2_Skippingexon_{—}8_#PEP_NUM_{—}179, comprising a polypeptide having the sequence FNL.

[0209] An isolated IL1RAP_Skippingexon_{—}11_#PEP_NUM_{—}169 polypeptide comprising a first amino acid sequence being at least about 90% homologous to amino acids 1-400 of IL1RAP, a bridging amino acid V and a second amino acid sequence being at least about 90% homologous to amino acids 450-570 of IL1RAP, wherein said first amino acid sequence is contiguous to said bridging amino acid and said amino sequence is contiguous to said bridging amino acid, and wherein said first amino acid sequence, said bridging amino acid and said second amino acid sequence are in a sequential order.

[0210] An isolated polypeptide of an edge portion of IL1RAP_Skippingexon_{—}11_#PEP_NUM_{—}169, comprising a first amino acid sequence being at least about 90% homologous to amino acids 390-400 of IL1RAP, a bridging amino acid V and a second amino acid sequence being at least about 90% homologous to amino acids 450-460 of IL1RAP, wherein said first amino acid sequence is contiguous to said bridging amino acid and said second amino acid sequence is contiguous to said bridging amino acid, and wherein said first amino acid sequence, said bridging amino acid and said second amino acid sequence are in a sequential order.

[0211] An isolated ITAV_Skipping_exon_{—}11_#PEP_NUM_{—}14 polypeptide, comprising a first amino acid sequence being at least about 90% homologous to amino acids 1-301 of ITAV, and a second amino acid sequence being at least about 70%, optionally at least about 80%, preferably at least about 85%, more preferably. At least about 90% and most preferably at least about 95% homologous to a polypeptide having the sequence. LCRCVYWSTSLHGSWL (SEQ ID NO: 235), wherein said first and said second amino acid sequences are contiguous and in a sequential order.

[0212] An isolated polypeptide corresponding to a tail of ITAV_Skipping_exon_{—}11_#PEP_NUM_{—}14, comprising a polypeptide having the sequence LCRCVYWSTSLHGSWL (SEQ ID NO: 235).

[0213] An isolated ITAV_Skipping_exon_{—}20_#PEP_NUM_{—}15 polypeptide, comprising a first amino acid sequence being at least about 90% homologous to amino acids 1-641 of ITAV, and a second amino acid sequence being at least about 90% homologous to amino acids 1025-1026 of ITAV, wherein said first and said second amino acid sequences are contiguous and in a sequential order.

[0214] An isolated polypeptide of an edge portion of ITAV_Skipping_exon_{—}20_#PEP_NUM_{—}15, comprising a first amino acid sequence being at least about 90% homologous to amino acids 631-641 of ITAV, and a second amino acid sequence being at least about 90% homologous to amino acids 1025-1026 of ITAV, wherein said first and said second amino acid sequences are contiguous and in a sequential order.

[0215] An isolated —ITAV_Skipping_exon_{—}21_#PEP_NUM_{—}16 polypeptide, comprising a first amino acid sequence being of at least 90% homologous to amino acids 1-691 of ITAV, and a second amino acid sequence being at least 90% homologous to amino acids 723-1048 of ITAV or a portion thereof wherein said first and said second amino acid sequences are contiguous and in a sequential order.

[0216] An isolated polypeptide of an edge portion of ITAV_Skipping_exon_{—}21_#PEP_NUM_{—}16, comprising a first amino acid sequence being at least 90% homologous to amino acids 681-691 of ITAV or a portion thereof, and a second amino acid sequence being at least 90% homologous to amino acids 723-733 of ITAV or a portion thereof, wherein said first and said second amino acid sequences are contiguous and in a sequential order.

[0217] An isolated ITAV_Skipping_exon_{—}25_#PEP_NUM_{—}17 polypeptide, comprising a first amino acid sequence being at least about 90% homologous to amino acids 1-811 of ITAV, and a second amino acid sequence being at least about 90% homologous to amino acids 865-1048 of ITAV, wherein said first and said second amino acid sequences are contiguous and in a sequential order.

[0218] An isolated polypeptide of fan edge portion of ITAV_Skipping_exon_{—}25_#PEP_NUM_{—}17, comprising a first amino acid sequence being at least about 90% homologous to amino acids 801-811 of ITAV, and a second amino acid sequence being at least about 90% homologous to amino acids 865-875 of ITAV, wherein said first and said second amino acid sequences are contiguous and in a sequential order.

[0219] An isolated ITGA2B_Skippingexon_{—}3_#PEP_NUM_{—}135 polypeptide, comprising a first amino acid sequence being at least 90% homologous to amino acids 1-104 of ITGA2B, and a second amino acid sequence being at least 70%, optionally at least 80%, preferably at least 85%, more preferably at least 90% and most preferably at least 95% homologous to a polypeptide having the sequence LRPLAALERPRKD, wherein said first and said second amino acid sequences are contiguous and in a sequential order.

[0220] An isolated polypeptide corresponding to a tail of ITGA2B_Skippingexon_{—}3_#PEP_NUM_{—}135, comprising a polypeptide having a sequence LRPLAALERPRKD.

[0221] An isolated JAG1_Skippingexon_{—}10_#PEP_NUM_{—}96 polypeptide, comprising a first amino acid sequence being at least about 90% homologous to amino acids 1-412 of JAG1, and a second amino acid sequence being at least about 90% homologous to amino acids 451-1218 of JAG1, wherein said first and said second amino acid sequences are contiguous and in a sequential order.

[0222] An isolated polypeptide of an edge portion of JAG1_Skippingexon_{—}40_#PEP_NUM_{—}96, comprising a first amino acid sequence being at least about 90% homologous to amino acids 402-412 of JAG1, and a second amino acid sequence being at least about 90% homologous to amino acids 451-461 of JAG1, wherein said first and said second amino acid sequences are contiguous and in a sequential order.

[0223] An isolated JAG1_Skippingexon_{—}12_#PEP_NUM_{—}97 polypeptide, comprising a first amino acid sequence being at least about 90% homologous to amino acids 1-465 of JAG1, and a second amino acid sequence being at least about 90% homologous to amino acids 524-1218 of JAG1, wherein said first and said second amino acid sequences are contiguous and in a sequential order.

[0224] An isolated polypeptide of an edge portion of JAG1_Skippingexon_{—}12_#PEP_NUM_{—}97, comprising a first amino acid sequence being at least about 90% homologous to amino acids 455-465 of JAG1, and a second amino acid sequence being at least about 90% homologous to amino acids 524-534 of JAG1, wherein said first and said second amino acid sequences are contiguous and in a sequential order.

[0225] An isolated JAG1_Skippingexon_{—}18_#PEP_NUM_{—}98 polypeptide, comprising a first amino acid sequence being at least about 90% homologous to amino acids 1-742 of JAG1, a bridging amino acid D and a second amino acid sequence being at least about 90% homologous to amino acids 783-1218 of JAG1, wherein said first amino acid sequence is contiguous to said bridging amino acid and said second amino acid sequence is contiguous to said bridging amino acid, and wherein said first amino acid sequence, said bridging amino acid and said second amino acid sequence are in a sequential order.

[0226] An isolated polypeptide of an edge portion of JAG1_Skippingexon_{—}18_#PEP_NUM_{—}98, comprising a first amino acid sequence being at least about 90% homologous to amino acids 732-742 of JAG1, a bridging amino acid D and a second amino acid sequence being at least about 90% homologous to amino acids 783-793 of JAG1, wherein said first amino acid sequence is contiguous to said bridging amino acid and said second amino acid sequence is contiguous to said bridging amino acid, and wherein said first amino acid sequence, said bridging amino acid and said second amino acid sequence are in a sequential order.

[0227] An isolated JAG1_Skippingexon_{—}22_#PEP_NUM_{—}99 polypeptide, comprising a first amino acid sequence being at least about 90% homologous to amino acids 1-857 of JAG1, and a second amino acid sequence being at least about 70%, optionally at least about 80%, preferably at least about 85%, more preferably at least about 90% and most preferably at least about 95% homologous to a polypeptide having the sequence GLVPSILPAPQRAQRVPQRAELHPHPGRPVLRPPLHWCGRVSVFQSPAGEDK VHL (SEQ ID NO: 236), wherein said first and said second amino acid sequences are contiguous and in a sequential order.

[0228] An isolated polypeptide corresponding to a tail of JAG1_Skippingexon_{—}22_#PEP_NUM_{—}99, comprising a polypeptide having the sequence GLVPSILPAPQRAQRVPQRAELHPHPGRPVLRPPLHWCGRVSVFQSPAGEDK VHL (SEQ ID NO: 236).

[0229] An isolated KDR_Skipping_exon_{—}16_#PEP_NUM_{—}9 polypeptide, comprising a first amino acid sequence being at least about 90% homologous to amino acids 1-756 of KDR, and a second amino acid sequence being at least about 70%, optionally at least about 80%, preferably at least about 85%, more preferably at least about 90% and most preferably at least about 95% homologous to a polypeptide having the sequence QWRGTEDRLLVHRHGSR (SEQ ID NO: 237), wherein said first and said second amino acid sequences are contiguous and in a sequential order.

[0230] An isolated polypeptide corresponding to a tail of KDR_Skipping_exon_{—}16_#PEP_NUM_{—}9, comprising a polypeptide having the sequence QWRGTEDRLLVHRHGSR (SEQ ID NO: 237).

[0231] An isolated KDR_Skipping_exon_{—}17_#PEP_NUM_{—}10 polypeptide, comprising a first amino acid sequence being at least about 90% homologous to amino acids 1-791 of KDR, and a second amino acid sequence being at least about 70%, optionally at least about 80%, preferably at least about 85% more preferably at least about 90% and most preferably at least about 95% homologous to a polypeptide having the sequence VSLLAVVPLAK (SEQ ID NO: 238), wherein said first and said second amino acid sequences are contiguous and in a sequential order.

[0232] An isolated polypeptide corresponding to a tail of KDR_Skipping_exon_{—}17_#PEP_NUM_{—}10, comprising a polypeptide having the sequence VSLLAVVPLAK (SEQ ID NO: 238).

[0233] An isolated KDR_Skipping_exon_{—}27_#PEP_NUM_{—}11 polypeptide, comprising a first amino acid sequence being at least about 90% homologous to amino acids 1-1171 of KDR, and a second amino acid sequence being at least about 70%, optionally at least about 80%, preferably at least about 85%, more preferably at least about 90% and most preferably at least about 95% homologous to a polypeptide having the sequence SVSAEQ (SEQ ID NO: 239), wherein said first and said second amino acid sequences are contiguous and in a sequential order.

[0234] An isolated polypeptide corresponding to a tail of KDR_Skipping_exon_{—}27_#PEP_NUM_{—}11, comprising a polypeptide having the sequence SVSAEQ (SEQ ID NO: 239).

[0235] An isolated KDR_Skipping_exon_{—}28_#PEP_NUM_{—}12 polypeptide, comprising a first amino acid sequence being at least about 90% homologous to amino acids 1-1220 of KDR, and a second amino acid sequenced being at least about 70%, optionally at least about 80%, preferably at least about 85%, more preferably at least about 90% and most preferably at least about 95% homologous to a polypeptide having the sequence RTTRRTVVWFLPQKS (SEQ ID NO: 240), wherein said first and said second amino acid sequences are contiguous and in a sequential order.

[0236] An isolated polypeptide corresponding to a tail of KDR_Skipping_exon_{—}28_#PEP_NUM_{—}12, comprising a polypeptide having the sequence RTTRRTVVWFLPQKS (SEQ ID NO: 240).

[0237] An isolated KDR_Skipping_exon_{—}29_#PEP_NUM_{—}13 polypeptide, comprising a first amino acid of sequence being at least about 90% homologous td amino acids 1-1254 of KDR, and a second amino acid sequence being at least about 70%, optionally at least about 80%, preferably at least about 85%, more preferably at least about 90% and most preferably at least about 95% homologous to a polypeptide having the sequence WNGAQQKQGVCGI (SEQ ID NO: 241), wherein said first and said second amino acid sequences are contiguous and in a sequential order.

[0238] An isolated polypeptide corresponding to a tail of KDR_Skipping_exon_{—}29_#PEP_NUM_{—}13, comprising a polypeptide having the sequence WNGAQQKQGVCGI (SEQ ID NO: 241).

[0239] An isolated KITLG_Skippingexon_{—}8_#PEP_NUM_{—}73 polypeptide, comprising a first amino acid sequence being at least about 90% homologous to amino acids 1-238 of KITLG, and a second amino acid sequence being at least about 70%, optionally at least about 80%, preferably at least about 85%, more preferably at least about 90% and most preferably at least about 95% homologous to a polypeptide having the sequence YVARERERVSRSVIVACINTVTFVHWLVTVHVCFINEAALNKFIFCLE (SEQ ID NO: 242), wherein said first and said second amino acid sequences are contiguous and in a sequential order.

[0240] An isolated polypeptide corresponding to a tail of KITLG_Skippingexon_{—}8_#PEP_NUM_{—}73, comprising a polypeptide having the sequence YVARERERVSRSVIVACINTVTFVHWLVTVHVCFINEAALNKFIFCLE (SEQ ID NO: 242).

[0241] An isolated KIT_Skippingexon_{—}14_#PEP_NUM_{—}75 polypeptide, comprising a first amino acid sequence being at least about 90% homologous to amino acids 1-663 of KIT, and a second amino acid sequence being at least about 70%, optionally at least about 80%, preferably at least about 85%, more preferably at least about 90% and most preferably at least about 95% homologous to a polypeptide having the sequence AAIVLMSTWT (SEQ ID NO: 243), wherein said first and said second amino acid sequences are contiguous and in a sequential order.

[0242] An isolated polypeptide corresponding to a tail of KIT_Skippingexon_{—}14_#PEP_NUM_{—}75, comprising a polypeptide having the sequence AAIVLMSTWT (SEQ ID NO: 243).

[0243] An isolated KIT_Skippingexon_{—}8_#PEP_NUM_{—}74 polypeptide, comprising a first amino acid sequence being at least about 90% homologous to amino acids 1-410 of KIT, and a second amino acid sequence being at least about 70%, optionally at least about 80%, preferably at least about 85%, more preferably at least about 90% and most preferably at least about 95% homologous to a polypeptide having the sequence NALLLYCQWMCRH (SEQ ID NO: 244), wherein, said first and said second amino acid sequences are contiguous and in a sequential order.

[0244] An isolated polypeptide corresponding to a tail of KIT_Skippingexon_{—}8_#PEP_NUM_{—}4, comprising a polypeptide having the sequence NALLLYCQWMCRH (SEQ ID NO: 244).

[0245] An isolated LSHR_Intron_{—}5_retention_#PEP_NUM_{—}36 polypeptide, consisting essentially of an amino acid sequence being at least about 90% homologous to amino acids 1-153 of LSHR.

[0246] An isolated LSHR Skipping_exon_{—}10_#PEP_NUM_{—}35 polypeptide, comprising a first amino acid sequence being at least about 90% homologous to amino acids 1-289 of LSHR, and a second amino acid sequence being at least about 90% homologous to amino acids 317-699 of LSHR, wherein said first and said second amino acid sequences are contiguous and in a sequential order.

[0247] An isolated polypeptide of an edge portion of LSHR_Skipping_exon_{—}10_#PEP_NUM_{—}35, comprising a first amino acid sequence being at least about 90% homologous to amino acids 279-289 of LSHR, and a second amino acid sequence, being at least about 90% homologous to amino acids 317-327 of LSHR, wherein said first and said second amino acid sequences are contiguous and in a sequential order.

[0248] An isolated LSHR_Skipping_exon_{—}2_#PEP_NUM_{—}30 polypeptide, comprising a first amino acid sequence being at least about 90% homologous to amino acids 1-54 of LSHR, and a second amino acid sequence being at least about 90% homologous to amino acids 79-699 of LSHR, wherein said first and said second amino acid sequences are contiguous and in a sequential order.

[0249] An isolated polypeptide of an edge portion of LSHR_Skipping_exon_{—}2_#PEP_NUM_{—}30, comprising a first amino acid sequence being at least about 90% homologous to amino acids 44-54 of LSHR, and a second amino acid sequence being at least about 90% homologous to amino acids 79-89 of LSHR, wherein said first and said second amino acid sequences are contiguous and in a sequential order.

[0250] An isolated LSHR Skipping_exon_{—}3_#PEP_NUM_{—}31 polypeptide, comprising a first amino acid sequence being at least about 90% homologous to amino acids 1-78 of LSHR, and a second amino acid sequence being at least about 90% homologous to amino acids 101-699 of LSHR, wherein said first and said second amino acid sequences are contiguous and in a sequential order.

[0251] An isolated polypeptide of an edge portion of LSHR_Skipping_exon_{—}3_#PEP_NUM_{—}31, comprising a first amino acid sequence being at least about 90% homologous to amino acids 68-78 of LSHR, and a second amino acid sequence being at least about 90% homologous to amino acids 101-111 of LSHR, wherein said first and said second amino acid sequences are contiguous and in a sequential order.

[0252] An isolated LSHR_Skipping_exon_{—}5_#PEP_NUM_{—}32 polypeptide, comprising a first amino acid sequence being at least about 90% homologous to amino acids 1-128 of LSHR, and a second amino acid sequence being at least about 90% homologous to amino acids 151-699 of LSHR, wherein said first and said second amino acid sequences are contiguous and in a sequential order.

[0253] An isolated polypeptide of an edge portion of LSHR_Skipping_exon_{—}5_#PEP_NUM_{—}32, comprising a first amino acid sequence being at least about 90% homologous to amino acids 118-128 of LSHR, and a second amino acid sequence being at least about 90% homologous to amino acids 151-161 of LSHR, wherein said first and said second amino acid sequences are contiguous and in a sequential order.

[0254] An isolated LSHR_Skipping_exon_{—}6_#PEP_NUM_{—}33 polypeptide, comprising a first amino acid sequence being at least about 90% homologous to amino acids 1-152 of LSHR, and a second amino acid sequence being at least about 90% homologous to amino acids 179-699 of LSHR, wherein said first and said second amino acid sequences are contiguous and in a sequential order.

[0255] An isolated polypeptide of an edge portion of LSHR_Skipping_exon_{—}6_#PEP_NUM_{—}33, comprising a first amino acid sequence being at least about 90% homologous to amino acids 142-152 of LSHR, and a second amino acid sequence being at least about 90% homologous to amino acids 179-189 of LSHR, wherein said first and said second amino acid sequences are contiguous and in a sequential order.

[0256] An isolated LSHR_Skipping_exon_{—}7_#PEP_NUM_{—}34 polypeptide, comprising a first amino acid sequence being at least about 90% homologous to amino acids 1-179 of LSHR, and a second amino acid sequence being at least about 90% homologous to 6 amino acids 201-699 of LSHR, wherein said first and said second amino acid sequences are contiguous and in a sequential order.

[0257] An isolated polypeptide of an edge portion of LSHR_Skipping_exon_{—}7_#PEP_NUM_{—}34, comprising a first amino acid sequence being at least about 90% homologous to amino acids 169-179 of LSHR, and a second amino acid sequence being at least about 90% homologous to amino acids 201-211 of LSHR, wherein said first and said second amino acid sequences are contiguous and in a sequential order.

[0258] An isolated M17S2_Skippingexon_{—}14_#PEP_NUM_{—}189 polypeptide, consisting essentially of an amino acid sequence being at least about 90% homologous to amino acids 1-558 of M17S2, followed by M.

[0259] An isolated M17S2_Skippingexon_{—}15_#PEP_NUM_{—}190 polypeptide, comprising a first amino acid sequence being at least about 90% homologous to amino acids 1-583 of M17S2, and a second amino acid sequence being at least about 90% homologous to amino acids 621-966 of M17S2, wherein said first and said second amino acid sequences are contiguous and in a sequential order.

[0260] An isolated polypeptide of an edge portion of M17S2_Skippingexon_{—}15_#PEP_NUM_{—}190, comprising a first amino acid sequence being at least about 090% homologous to amino acids 573-583 of M17S2, and a second amino acid sequence being at least about 90% homologous to amino acids 621-631 of M17S2, wherein said first and said second amino acid sequences are contiguous and in a sequential order.

[0261] An isolated M17S2 Skippingexon_{—}20_#PEP_NUM_{—}191 polypeptide, comprising a first amino acid sequence being at least about 90% homologous to amino acids 1-873 of M17S2, and a second amino acid sequence being at least about 90% homologous to amino acids 963-964 of M17S2, wherein said first and said second amino acid sequences are contiguous and in a sequential order.

[0262] An isolated polypeptide of an edge portion of M17S2_Skippingexon_{—}20_#PEP_NUM_{—}191, comprising a first amino acid sequence being at least about 90% homologous to amino acids 863-873 of M17S2, and a second amino acid sequence being at least about 90% homologous to amino acids 963-964 of M17S2, wherein said first and said second amino acid sequences are contiguous and in a sequential order.

[0263] An isolated MET_Skipping_exon_{—}12_#PEP_NUM_{—}18 polypeptide, comprising a first amino acid sequence being at least about 90% homologous to amino acids 1-861 of MET, and a second amino acid sequence being at least about 90% homologous to amino acids 911-1390 of MET, wherein said first and said second amino acid sequences are continuous and in a sequential order.

[0264] An isolated polypeptide of an edge portion of MET_Skipping_exon_{—}12_#PEP_NUM_{—}18, comprising a first amino acid sequence being at least about 90% homologous to amino acids 851-861 of MET, and a second amino acid sequence being at least about 90% homologous to amino acids 911-921 of MET, wherein said first and said second amino acid sequences are contiguous and in a sequential order.

[0265] An isolated MET_Skipping_exon_{—}14_#PEP_NUM_{—}19 polypeptide, comprising a first amino acid sequence being at least about 90% homologous to amino acids 1-962 of MET, and a second amino acid sequence being at least about 90% homologous to amino acids 1010-1390 of MET, wherein said first and said second amino acid sequences are contiguous and in a sequential order.

[0266] An isolated polypeptide of an edge portion of MET_Skipping_exon_{—}14_#PEP_NUM_{—}19, comprising a first amino acid sequence being at least about 90% homologous to amino acids 952-962 of MET, and a second amino acid sequence being at least about 90% homologous to amino acids 1010-1020 of MET, wherein said first and said second amino acid sequences are contiguous and in a sequential order.

[0267] An isolated MET_Skipping_exon_{—}18_#PEP_NUM_{—}20 polypeptide, comprising a first amino acid sequence being at least about 90% homologous to amino acids 1-1174 of MET, and a second amino acid sequence being at least about 70%, optionally at least about 80%, preferably at least about 85%, more preferably at least about 90% and most preferably at least about 95% homologous to a polypeptide having the sequence AG, wherein said first and said second amino acid sequences are contiguous and in a sequential order.

[0268] An isolated polypeptide corresponding to a tail of MET_Skipping_exon_{—}18_#PEP_NUM_{—}20, comprising a polypeptide having the sequence AG.

[0269] An isolated MME_Skippingexon_{—}11_#PEP_NUM_{—}153 polypeptide, comprising a first amino acid sequence being at least about 90% homologous to amino acids 1-318 of MME, and a second amino acid sequence being at least about 70%, optionally at least about 80%, preferably at least about 85%, more preferably 4 at least about 90% and most preferably at least about 95% homologous to a polypeptide having the sequence RSSKFNVLEIHNGSCKQPQPNLQGVQKCFPQGPLWYNLRNSNLETLCKLCQW EYGKCCGEALCGSSICWRE (SEQ ID NO: 245), wherein said first and said second amino acid sequences are contiguous and in a sequential order.

[0270] An isolated polypeptide corresponding to a tail of MME_Skippingexon_{—}11_#PEP_NUM_{—}153, comprising a polypeptide having the sequence RSSKFNVLEIHNGSCKQPQPNLQGVQKCFPQGPLWYNLRNSNLETLCKLCQW EYGKCCGEALCGSSICWRE (SEQ ID NO: 245).

[0271] An isolated MME_Skippingexon_{—}12_#PEP_NUM_{—}154 polypeptide, comprising a first amino acid sequence being at least about 90% homologous to amino acids 1-364 of MME, and a second amino acid sequence being at least about 70%, optionally at least about 80%, preferably at least about 85%, more preferably at least about 90% and most preferably at least about 95% homologous to a polypeptide having the sequence PFMVQPQKQQLGDVVQTMSMGIWKMLWGGFMWKQHLLERVNMWSRI (SEQ ID NO: 246), wherein said first and said second amino acid sequences are contiguous and in a sequential order.

[0272] An isolated polypeptide corresponding to a tail of MME_Skippingexon_{—}12_#PEP_NUM_{—}154, comprising a polypeptide having the sequence PFMVQPQKQQLGDVVQTMSMGIWKMLWGGFMWKQHLLERVNMWSRI (SEQ ID NO: 246).

[0273] An isolated MME_Skipping_exon_{—}16_#PEP_NUM_{—}155 polypeptide, comprising a first amino acid sequence being at least about 90% homologous to amino acids 1-498 of MME, and a second amino acid sequence being at least about 70%, optionally at least about 80%, preferably at least about 85%, more preferably at least about 90% and most preferably at least about 95% homologous to a polypeptide having the sequence VDKWSSCSQCILLFRKKSDSLPSRHSAAPLL (SEQ ID NO: 247), wherein said first and said second amino acid sequences are contiguous and in a sequential order.

[0274] An isolated polypeptide corresponding to a tail of MME_Skippingexon_{—}16_#PEP_NUM_{—}155, comprising a polypeptide having the sequence VDKWSSCSQCILLFRKKSDSLPSRHSAAPLL (SEQ ID NO: 247).

[0275] An isolated MME_Skippingexon_{—}4_#PEP_NUM_{—}150 polypeptide, comprising a first amino acid sequence being at least bout % homologous to amino acids 1-64 of MME, and a second amino acid sequence being at least about 90% homologous to amino acids 119-749 of MME, wherein said first and said second amino acid sequences are contiguous and in a sequential order.

[0276] An isolated polypeptide of an edge portion of MME_Skippingexon_{—}4_#PEP_NUM_{—}150, comprising a first amino acid sequence being at least about 90% homologous to amino acids 54-64 of MME, and a second amino acid sequence being at least about 90% homologous to amino acids 119-129 of MME, wherein said first and said second amino acid sequences are contiguous and in a sequential order.

[0277] An isolated MME_Skippingexon_{—}7_#PEP_NUM_{—}151 polypeptide, consisting essentially of an amino acid sequence being at least about 90% homologous to amino acids 1-177 of MME, followed by D.

[0278] An isolated MME_Skippingexon_{—}9_#PEP_NUM_{—}152 polypeptide, comprising a first amino acid sequence being at least about 90% homologous to amino acids 1-239 of MME, and a second amino acid sequence being at least about 90% homologous to amino acids 285-749 of MME, wherein said first and said second amino acid sequences are contiguous and in a sequential order.

[0279] An isolated polypeptide of an edge portion of MME_Skippingexon_{—}9_#PEP_NUM_{—}152, comprising a first amino acid sequence being at least about 90% homologous to amino acids 229-239 of MME, and a second amino acid sequence being at least about 90% homologous to amino acids 285-295 of MME, wherein said first and said second amino acid sequences are contiguous and in a sequential order.

[0280] An isolated MPL_Skippingexon_{—}2_#PEP_NUM_{—}136 polypeptide, comprising a first amino acid sequence being at least about 90% homologous to ammo acids 1-26 of MPL, and a second amino acid sequence being at least about 70%, optionally at least about 80%, preferably about 85% more preferably at least about 90% and most preferably at least about 95% homologous to a polypeptide having the sequence GRSPVLAP (SEQ ID NO: 248), wherein said first and said second amino acid sequences are contiguous and in a sequential order.

[0281] An isolated polypeptide corresponding to a tail of MPL_Skippingexon_{—}2_#PEP_NUM_{—}136, comprising a polypeptide having the sequence GRSPVLAP (SEQ ID NO: 248).

[0282] An isolated NOTCH2_Skipping_exon_{—}12_#PEP_NUM_{—}101 polypeptide, comprising a first amino acid sequence being at least about 90% homologous to amino acids 1-638 of NOTCH2, and a second amino acid sequence being at least about 90% homologous to amino acids 676-2471 of NOTCH2, wherein said first and said second amino acid sequences are contiguous and in a sequential order.

[0283] An isolated polypeptide of an edge portion of NOTCH2_Skipping_exon_{—}12_#PEP_NUM_{—}101, comprising a first amino acid sequence being at least about 90% homologous to amino acids 628-638 of NOTCH2, and a second amino acid sequence being at least about 90% homologous to amino acids 676-686 of NOTCH2, wherein said first and said second amino acid sequences are contiguous and in a sequential order.

[0284] An isolated NOTCH2_Skippingexon_{—}9_#PEP_NUM_{—}100 polypeptide, comprising a first ammo acid sequence being at least about 90% homologous to amino acids 1-483 of NOTCH2, and a second amino acid sequence being at least about 90% homologous to amino acids 522-2471 of NOTCH2, wherein said first and said second amino acid sequences are contiguous and in a sequential order.

[0285] An isolated polypeptide of an edge portion of NOTCH2_Skippingexon_{—}9_#PEP_NUM_{—}100, comprising a first amino acid sequence being at least about 90% homologous to amino acids 473-483 of NOTCH2, and a second amino acid sequence being at least about 90% homologous to amino acids 522-532 of NOTCH2, wherein said first and said second amino acid sequences are contiguous and in a sequential order.

[0286] An isolated NOTCH3_Skippingexon_{—}2_#PEP_NUM_{—}102 polypeptide, comprising a first amino acid sequence being at least about 90% homologous to amino acids 1-39 of NOTCH3, and a second amino acid sequence being at least about 70%, optionally at least about 80%, preferably at least about 85%, more preferably at least about 90% and most preferably at least about 95% homologous to a polypeptide having the sequence GARLAGWVSGVSWRTPVTQAPVLAVVSARVQWWLAPPDSHAGAPVASEAL TAPCQIPASAALVPTVPAAQWGPMDASSAPAHLATRAAAAEATWMSAGWV SPAAMVAPASTHLAPSAASVQLATQGHYVRTPRCPVHPHHAVTGAPAGRVA TSLTTVPVFLGLRVRIVK (SEQ ID NO: 249), wherein said first and said second amino acid sequences are contiguous and in a sequential order.

[0287] An isolated polypeptide corresponding to a tail of NOTCH3_Skippingexon_{—}2_#PEP_NUM_{—}102, comprising a polypeptide having the sequence GARLAGWVSGVSWRTPVTQAPVLAVVSARVQWWLAPPDSHAGAPVASEAL TAPCQIPASAALVPTVPAAQWGPMDASSAPAHLATRAAAAEATWMSAGWV SPAAMVAPASTHLAPSAASVQLATQGHYVRTPRCPVHPHHAVTGAPAGRVA TSLTTVPVFLGLRVRIVK (SEQ ID NO: 249).

[0288] An isolated NOTCH4_Skipping_exon_{—}8_#PEP_NUM_{—}103 polypeptide, comprising a first amino acid sequence being at least about 90% homologous to amino acids 1-438 of NOTCH4, and a second amino acid sequence being at least about 90% homologous to amino acids 504-2003 of NOTCH4, wherein said first and said second amino acid sequences are contiguous and in a sequential order.

[0289] An isolated polypeptide of an edge portion of NOTCH4_Skipping exon_{—}8_#PEP_NUM_{—}103, comprising a first amino acid sequence being at least about 90% homologous to amino acids 428-438 of NOTCH4, and a second amino acid sequence being at least about 90% homologous to amino acids 504-514 of NOTCH4, wherein said first and said second amino acid sequences are contiguous and in a sequential order.

[0290] An isolated NRG1_HGR-ALPHA_skippingexon_{—}5_#PEP_NUM_{—}82 polypeptide, comprising a first amino acid sequence being at least about 90% homologous to amino acids 1-150 of NRG1-HRG-ALPHA, a bridging amino acid A and a second amino acid sequence being at least about 90% homologous to amino acids 169-640 of NRG1-HRG-ALPHA, wherein said first amino acid sequence is contiguous to said bridging amino acid and said second amino acid sequence is contiguous to said bridging amino acid, and wherein said first amino acid sequence, said bridging amino acid and said second amino acid sequence are in a sequential order.

[0291] An isolated polypeptide of an edge portion of NRG1_HGR-ALPHA_skippingexon_{—}5_#PEP_NUM_{—}82, comprising a first amino acid sequence being at least about 90% homologous to amino acids 140-150 of NRG1-HRG-ALPHA, a bridging amino acid A and a second amino acid sequence being at least about 90% homologous to amino acids 169-179 of NRG1-HRG-ALPHA, wherein said first amino acid sequence is contiguous to said bridging amino acid and said second amino acid sequence is contiguous to said bridging amino acid, and wherein said first amino acid sequence, said bridging amino acid and said second amino acid sequence are in a sequential order.

[0292] An isolated NRG1_HGR-ALPHA_skippingexon_{—}7_#PEP_NUM_{—}83 polypeptide, comprising a first amino acid sequence being at least about 90% homologous to amino acids 1-211 of NRG1-HRG-ALPHA, and a second amino acid sequence being at least about 70%, optionally at least about 80%, preferably at least about 85%, more preferably at least about 90% and most preferably at least about 95% homologous to a polypeptide having the sequence GGGAVPEESADHNRHLHRPPCGRHHVCGGLLQNQETAEKAA (SEQ ID NO: 250), wherein said first and said second amino acid sequences are contiguous and in a sequential order.

[0293] An isolated polypeptide corresponding to a tail of NRG1_HGR-ALPHA_skippingexon_{—}7_#PEP_NUM_{—}83, comprising a polypeptide having the sequence GGGAVPEESADHNRHLHRPPCGRHHVCGGLLQNQETAEKAA (SEQ ID NO: 250).

[0294] An isolated NRG1_HGR-BETA1_skippingexon_{—}5_#PEP_NUM_{—}84 polypeptide, comprising a first amino acid sequence being at least about 90% homologous to amino acids 1-150 of NRG1-HRG-BETA1, a bridging amino acid A and a second amino acid sequence being at least about 90% homologous to amino acids 169-645 of NRG1-HRG-BETA1, wherein said first amino acid sequence is contiguous to said bridging amino acid and said second amino acid sequence is contiguous to said bridging amino acid, and wherein said first amino acid sequence, said bridging amino acid and said second amino acid sequence are in a sequential order.

[0295] An isolated polypeptide of an edge portion of NRG1_HGR-BETA1_skippingexon_{—}5_#PEP_NUM_{—}84, comprising a first amino acid sequence being at least about 90% homologous to amino acids 140-150 of NRG1-HRG-BETA1, a bridging amino acid A and a second amino acid sequence being at least about 90% homologous to amino acids 169-179 of NRG1-HRG-BETA1, wherein said first amino acid sequence is contiguous to said bridging amino acid and said second amino acid sequence is contiguous to said bridging amino acid, and wherein said first amino acid sequence, said bridging amino acid and said second amino acid sequence are in a sequential order.

[0296] An isolated NRG1_HGR-BETA1_skippingexon_{—}7_#PEP_NUM_{—}85 polypeptide, comprising a first amino acid sequence being at least about 90% homologous to amino acids 1-211 of NRG1-HRG-BETA1 NRG1-HRG-BETA2 NRG1-HRG-BETA3, and a second amino acid sequence being at least about 70%, optionally at least about 80%, preferably at least about 85%, more preferably at least about 90% and most preferably at least about 95% homologous to a polypeptide having the sequence GGGAVPEESADHNRHLHRPPCGRHHVCGGLLQNQETAEKAA (SEQ ID NO: 251), wherein said first and said second amino acid sequences are contiguous and in a sequential order.

[0297] An isolated polypeptide corresponding to a tail of NRG1-HGR-BETA1_skippingexon_{—}7_#PEP_NUM_{—}85, comprising a polypeptide having the sequence GGGAVPEESADHNRHLHRPPCGRHHVCGGLLQNQETAEKAA (SEQ ID NO: 251).

[0298] An isolated NRG1_HGR-BETA1_skippingexon_{—}8_#PEP_NUM_{—}86 polypeptide, comprising a first amino acid sequence being at least about 90% homologous to amino acids 1-231 of NRG1-HRG-BETA1, and a second amino acid sequence being at least about 90% homologous to amino acids 240-645 of NRG1-HRG-BETA1, wherein said first and said second amino acid sequences are contiguous and in a sequential order.

[0299] An isolated polypeptide of an edge portion of NRG1_HGR-BETA1_skippingexon_{—}8_#PEP_NUM_{—}86, comprising a first amino acid sequence being at least about 90% homologous to amino acids 221-231 of NRG1-HRG-BETA1, and a second amino acid sequence being at least about 90% homologous to amino acids 240-250 of NRG1-HRG-BETA1, wherein said first and said second amino acid sequences are contiguous and in a sequential order.

[0300] An isolated NRG1_HGR-BETA1_skippingexon_{—}9_#PEP_NUM_{—}87, polypeptide, comprising a first amino acid sequence being at least about 90% homologous to amino acids 1-230 of NRG1-HRG-BETA1, and a second amino acid sequence being at least about 70%, optionally at least about 80%, preferably at least about 85%, more preferably at least about 90% and most preferably at least about 95% homologous to a polypeptide having the sequence RNSGKSCMTVFGRAFGLNETI (SEQ ID NO: 252), wherein said first and said second amino acid sequences are contiguous and in a sequential order.

[0301] An isolated polypeptide corresponding to a tail of NRG1_HGR-BETA1_skippingexon_{—}9_#PEP_NUM_{—}87, comprising a polypeptide having the sequence RNSGKSCMTVFGRAFGLNETI (SEQ ID NO: 252).

[0302] An isolated NRG1_HGR-BETA2_skippingexon_{—}5_#PEP_NUM_{—}88 polypeptide, comprising a first amino acid sequence being at least about 90% homologous to amino acids 1-150 of NRG1-HRG-BETA2, a bridging amino acid A and a second amino acid sequence being at least about 90% homologous to amino acids 169-636 of NRG1-HRG-BETA2, wherein said first amino acid sequence is contiguous to said bridging amino acid and said second amino acid sequence is contiguous to said bridging amino acid, and wherein said first amino acid sequence, said bridging amino acid and said second amino acid sequence are in a sequential order.

[0303] An isolated polypeptide of an edge portion of NRG1_HGR-BETA2_skippingexon_{—}5_#PEP_NUM_{—}88, comprising a first amino acid sequence being at least about 90% homologous to amino acids 140-150 of NRG1-HRG-BETA2, a bridging amino acid A and a second amino acid sequence being at least about 90% homologous to amino acids 169-179 of NRG1-HRG-BETA2, wherein said first amino acid sequence is contiguous to said bridging amino acid and said second amino acid sequence is contiguous to said bridging amino acid, and wherein said first amino acid sequence, said bridging amino acid and said second amino acid sequence are in a sequential order.

[0304] An isolated NRG1_HGR-BETA2_skippingexon_{—}8_#PEP_NUM_{—}89 polypeptide, comprising a first amino acid sequence being at least about 90% homologous to amino acids 1-230 of NRG1-HRG-BETA NRG1-HRG-BETA3, and a second amino acid sequence being at least about 70%, optionally at least about 80%, preferably at least about 85%, more preferably at least about 90% and most preferably at least about 95% homologous to a polypeptide having the sequence RNSGKSCMTVFIGRAFGLNETI (SEQ ID NO: 253), wherein said first and said second amino acid sequences are contiguous and in a sequential order.

[0305] An isolated polypeptide corresponding to a tail of NRG1_HGR-BETA2_skippingexon_{—}8_#PEP_NUM_{—}89, comprising a polypeptide having the sequence RNSGKSCMTVFGRAFGLNETI (SEQ ID NO: 253).

[0306] An isolated NRG1_HGR-BETA3_skippingexon_{—}5_#PEP_NUM_{—}90 polypeptide, comprising a first amino acid sequence being at least about 90% homologous to amino acids 1-150 of NRG1-HRG-BETA3, a bridging amino acid A and a second amino acid sequence being at least about 90% homologous to amino acids 169-241 of NRG1-HRG-BETA3, wherein said first amino acid sequence is contiguous to said bridging amino acid and said second amino acid sequence is contiguous to said bridging amino acid, and wherein said first amino acid sequence, said bridging amino acid and said second amino acid sequence are in a sequential order.

[0307] An isolated polypeptide of an edge portion of NRG1_HGR-BETA3_skippingexon_{—}5_#PEP_NUM_{—}90, comprising a first amino acid sequence being at least about 90% homologous to amino acids 140-150 of NRG1-HRG-BETA3, a bridging amino acid A and a second amino acid sequence being at least about 90% homologous to amino acids 169-179 of NRG1-HRG-BETA3, wherein said first amino acid sequence is contiguous to said bridging amino acid and said second amino acid sequence is contiguous to said bridging amino acid, and wherein said first amino acid sequence, said bridging amino acid and said second amino acid sequence are in a sequential order.

[0308] An isolated NRG1_HGR-GAMMA_skippingexon_{—}5_#PEP_NUM_{—}91 polypeptide, comprising a first amino acid sequence being at least about 90% homologous to amino-acids 1-150 of NRG1-HRG-GAMMA, a bridging amino acid, A and a second amino acid sequence being at least about 90% homologous to amino acids 169-211 of NRG1-HRG-GAMMA, wherein said first amino acid sequence is contiguous to said bridging no acid and said second amino acid sequence contiguous to said bridging amino acid and wherein said first amino acid sequence, said bridging amino acid and said second amino acid sequence are in a sequential order.

[0309] An isolated polypeptide of an edge portion of NRG1_HGR-GAMMA_skippingexon_{—}5_#PEP_NUM_{—}91, comprising a first amino acid sequence being at least about 90% homologous amino acids 140-150 of NRG1-HRG-GAMMA, a bridging amino acid A and a second amino acid sequence being at least about 90% homologous to amino acids 169-179 of NRG1-HRG-GAMMA, wherein said first amino acid sequence is contiguous to said bridging amino acid and said second amino acid sequence is contiguous to said bridging amino acid, and wherein said first amino acid sequence, said bridging amino acid and said second amino acid sequence are in a sequential order.

[0310] An isolated NRG1_HGR-GGF_skippingexon_{—}5_#PEP_NUM_{—}92 polypeptide, comprising a first amino acid sequence being at least about 90% homologous to amino acids 1-150 of NRG1-HRG-GGF, a bridging amino acid A and a second amino acid sequence being at least about 90% homologous to amino acids 169-241 of NRG1-HRG-GGF, wherein said first amino acid sequence is contiguous to said bridging amino acid and said second amino acid sequence is contiguous to said bridging amino acid, and wherein said first amino acid sequence, said bridging amino acid and said second amino acid sequence are in a sequential order.

[0311] An isolated polypeptide of an edge portion of NRG1_HGR-GGF_skippingexon_{—}5_#PEP_NUM_{—}92, comprising a first amino acid sequence being at least about 90% homologous to amino acids 140-150 of NRG1-HRG-GGF, a bridging amino acid A and a second amino acid sequence being at least about 90% homologous to amino acids 169-179 of NRG1-HRG-GGF, wherein said first amino acid sequence is contiguous to said bridging amino acid and said second amino acid sequence is contiguous to said bridging amino acid, and wherein said first amino acid sequence, said bridging amino acid and said second amino acid sequence are in a sequential order.

[0312] An isolated NRG1_NDF43_skippingexon_{—}12_#PEP_NUM_{—}95 polypeptide, comprising a first amino acid sequence being at least about 90% homologous to amino acids 1-423 of NRG1-NDF43, and a second amino acid sequence being at least about 70%, optionally at least about 80%, preferably at least about 8 more preferably at least about 90% and most preferably at least about 95% homologous to a polypeptide having the sequence YVSAMTTPARMSPVDFHTPSSPKSPPSEMSPPVSSMTVSMPSMAVSPFMEEER PLLLVTPPRLREKKFDHHPQQFSSFHHNPAHDSNSLPASPLRIVEDEEYETTQE YEPAQEPVK (SEQ ID NO: 254), wherein said first and said second amino acid sequences are contiguous and in a sequential order.

[0313] An isolated polypeptide corresponding to a tail of NRG1_NDF43_skippingexon_{—}12_#PEP_NUM_{—}95, comprising a polypeptide having the sequence YVSAMTTPARMSPVDFHTPSSPKSPPSEMSPPVSSMTVSMPSMAVSPFMEEER PLLLVTPPRLREKKFDHHPQQFSSFHHNPAHDSNSLPASPLRIVEDEEYETTQE YEPAQEPVK (SEQ ID NO: 254).

[0314] An isolated NRG1_NDF43_skippingexon_{—}5_#PEP_NUM_{—}93 polypeptide, comprising a first amino acid sequence being at least about 90% homologous to amino acids 1-150 of NRG1-NDF43, a bridging amino acid A and a second amino acid sequence being at least about 90% homologous to amino acids 169-462 of NRG1-NDF43, wherein said first amino acid sequence is contiguous to said bridging amino acid and said second amino acid sequence is contiguous to said bridging amino acid, and wherein said first amino acid sequence, said bridging amino acid and said second amino acid sequence are in a sequential order.

[0315] An isolated polypeptide of an edge portion of NRG1_NDF43_skippingexon_{—}5_#PEP_NUM_{—}93, comprising a first amino acid sequence being at least about 90% homologous to amino acids 140-150 of NRG1-NDF43, a bridging amino acid A and a second amino acid sequence being at least about 90% homologous to amino acids 169-179 of NRG1-NDF43, wherein said first amino acid sequence is contiguous to said bridging amino acid and said second amino acid sequence is contiguous to said bridging amino acid, and wherein said first amino acid sequence, said bridging amino acid and said second amino acid sequence are in a sequential order.

[0316] An isolated NRG1_NDF43_skippingexon_{—}7_#PEP_NUM_{—}94 polypeptide, comprising a first amino acid sequence being at least about 90% homologous to amino acids 1-211 of NRG1-NDF43, and a second amino acid sequence being at least about 70%, optionally at least about 80%, preferably at least about 85%, more preferably at least about 90% and most preferably at least about 95% homologous to a polypeptide having the sequence GGGAVPEESADHNRHLHRPPCGRHHVCGGLLQNQETAEKAA (SEQ ID NO: 255), wherein said first and said second amino acid sequences are contiguous and in a sequential order.

[0317] An isolated polypeptide corresponding to a tail of NRG1_NDF43_skippingexon_{—}7_#PEP_NUM_{—}94, comprising a polypeptide having the sequence. GGGAVPEESADHNRHLHRPPCGRHHVCGGLLQNQETAEKAA (SEQ ID NO: 255).

[0318] An isolated NRP1_Skippingexon_{—}5_#PEP_NUM_{—}112 polypeptide, comprising a first amino acid sequence being at least about 90% homologous to amino acids 1-219 of NRP1, and a second amino acid sequence being at least about 90% homologous to amino acids 272-923 of NRP1, wherein said first and said second amino acid sequences are contiguous and in a sequential order.

[0319] An isolated polypeptide of an edge portion of NRP1_Skippingexon_{—}5_#PEP_NUM_{—}112, comprising a first amino acid sequence being at least about 90% homologous to ammo acids 209-219 of NRP1, and a second amino acid sequence being at least about 90% homologous to amino acids 272-282 of NRP1, wherein said first and said second amino acid sequences are contiguous and in a sequential order.

[0320] An isolated NTRK2_skippingexon_{—}14_#PEP_NUM_{—}104 polypeptide, consisting essentially of an amino acid sequence being at least about 90% homologous to amino acids 1-240 of NTRK2.

[0321] An isolated NTRK3_Skippingexon_{—}16_#PEP_NUM_{—}106 polypeptide, comprising a first amino acid sequence being at least 90% homologous to amino acids 1-630 of NTRK3, and a second amino acid sequence being at least 70%, optionally at least 80%, preferably at least 85%, more preferably at least 90% and most preferably at least 95% homologous to a polypeptide having the sequence WEDTPCSPFAGCLLKASCTGSSLQRVMYGASG, wherein said first and said second amino acid sequences are contiguous and in a sequential order.

[0322] An isolated polypeptide corresponding to a tail of NTRK3_Skippingexon_{—}16_#PEP_NUM_{—}106, comprising a polypeptide having the sequence WEDTPCSFAGCLLKASCTGSSLQRVMYGASG.

[0323] An isolated NTRK3_Skippingexon_{—}5_#PEP_NUM_{—}105 polypeptide, comprising a first amino acid sequence being at least about 90 “% homologous to amino acids 1-131 of NTRK3, and a second amino acid sequence being at least about 90% homologous to amino acids 156-839 of NTRK3, wherein said first and said second amino acid sequences are contiguous and in a sequential order.

[0324] An isolated polypeptide of an edge portion of NTRK3_Skippingexon_{—}5_#PEP_NUM_{—}105, comprising a first amino acid sequence being at least about 90% homologous to amino acids 121-131 of NTRK3, and a second amino acid sequence being at least about 90% homologous to amino acids 156-166 of NTRK3, wherein said first and said second amino acid sequences are contiguous and in a sequential order.

[0325] An isolated PROS1_Skippingexon_{—}3_#PEP_NUM_{—}185 polypeptide comprising a first amino acid sequence being at least about 90% homologous to amino acids 1-78 of PROS1, and a second amino acid sequence being at least about 70%, optionally at least about 80%, preferably at least about 85%, more preferably at least about 90% and most preferably at least about 95% homologous to a polypeptide having the sequence FVFALFKLGYSLLHVSQLMLILT (SEQ ID NO: 256), wherein said first and said second amino acid sequences are contiguous and in a sequential order.

[0326] An isolated polypeptide corresponding to a tail of PROS1_Skippingexon_{—}3_#PEP_NUM_{—}185, comprising a polypeptide having the sequence FVFALFKLGYSLLHVSQLMLILT (SEQ ID NO: 256).

[0327] An isolated PTPRB_Skippingexon_{—}26_#PEP_NUM_{—}72 polypeptide, comprising a first amino acid sequence being at least about 90% homologous to amino acids 1-1738 of PTPRB, and a second amino acid sequence being at least about 70%, optionally at least about 80%, preferably at least about 85%, more preferably at least about 90% and most preferably at least about 95% homologous to a polypeptide having the sequence WQQLQKRIHCHSGTASWHQG (SEQ ID NO: 257), wherein said first and said second amino acid sequences are contiguous and in a sequential order.

[0328] An isolated polypeptide corresponding to a tail of PTPRB_Skippingexon_{—}26_#PEP_NUM_{—}72, comprising a polypeptide having the sequence WQQLQKRIHCHSGTASWHQG (SEQ ID NO: 257.)

[0329] An isolated PTPRZ1_Skippingexon_{—}11_#PEP_NUM_{—}67 polypeptide, comprising a first, amino acid sequence being at least about 90% homologous to amino acids 1-413 of PTPRZ1, and a second amino acid sequence being at least about 70%, optionally at least about 80% preferably at least about 85%, more preferably at least about 90% and most preferably at least about 95% homologous to a polypeptide having the sequence GGGRGKRH (SEQ ID NO: 258), wherein said first and said second amino acid sequences are contiguous and in a sequential order.

[0330] An isolated polypeptide corresponding to a tail of PTPRZ1_Skippingexon_{—}11_#PEP_NUM_{—}67, comprising a polypeptide having the sequence GGGRGKRH (SEQ ID NO: 258).

[0331] An isolated PTPRZ1_Skippingexon_{—}13_#PEP_NUM_{—}68 polypeptide, comprising a first amino acid sequence being at least about 90% homologous to amino acids 1-1613 of PTPRZ1, and a second amino acid sequence being at least about 70%, optionally at least about 80%, preferably at least about 85%, more preferably at least about 90% and most preferably at least about 95% homologous to a polypeptide having the sequence GNASRLHTFT (SEQ ID NO: 258), wherein said first and said second amino acid sequences are contiguous and in a sequential order.

[0332] An isolated polypeptide corresponding to a tail of PTPRZ1_Skippingexon_{—}13_#PEP_NUM_{—}68, comprising a polypeptide having the sequence GNASRLHTFT (SEQ ID NO: 259).

[0333] An isolated PTPRZ1_Skippingexon_{—}15_#PEP_NUM_{—}69 polypeptide, comprising a first amino acid sequence being at least about 90% homologous to amino acids 1-1693 of PTPRZ1, and a second amino acid sequence being at least about 70%, optionally at least about 80%, preferably at least about 85%, more preferably at least about 90% and most preferably at least about 95% homologous to a polypeptide having the sequence TEEVLPGLRYYDEQLQPPEQQAQESIHKYRCL (SEQ ID NO: 260), wherein said first and said second amino acid sequences are contiguous and in a sequential order.

[0334] An isolated polypeptide corresponding to a tail of PTPRZ1_Skippingexon_{—}15_#PEP_NUM_{—}69, comprising a polypeptide having the sequence TEEVLPGLRYYDEQLQPPEQQAQESIHKYRCL (SEQ ID NO: 260).

[0335] An isolated PTPRZ1_Skippingexon_{—}16_#PEP_NUM_{—}70 polypeptide, comprising a first amino acid sequence being at least about 90% homologous to amino acids 1-1721 of PTPRZ1, and a second amino acid sequence being at least about 90% homologous to amino acids 1729-2314 of PTPRZ1, wherein said first and said second amino acid sequences are contiguous and in a sequential order.

[0336] An isolated polypeptide of an edge portion of PTPRZ1_Skippingexon_{—}16_#PEP_NUM_{—}70, comprising a first amino acid sequence being at least about 90% homologous to amino acids 1711-1721 of PTPRZ1, and a second amino acid sequence being at least about 90% homologous to amino acids 1729-1739 of PTPRZ1, wherein said first and said second amino acid sequences are contiguous and in a sequential order.

[0337] An isolated PTPRZ1_Skippingexon_{—}22_#PEP_NUM_{—}71 polypeptide, comprising a first amino acid sequence being at least about 90% homologous to amino acids 1-1932 of PTPRZ1, and a second amino acid sequence being at least about 70%, optionally at least about 80%, preferably at least about 85%, more preferably at least about 90% and most preferably at least about 95% homologous to a polypeptide having the sequence RSNMSSFMIHWLRPYLVKKLRCWTVIFMPMLMHSSFLDQQAKQ (SEQ ID NO: 261), wherein said first and said second amino sequences are contiguous and in a sequential order.

[0338] An isolated polypeptide corresponding to a tail of PTPRZ1_Skippingexon_{—}22_#PEP_NUM_{—}71, comprising a polypeptide having the sequence RSNMSSFMIHWLRPYLVKKLRCWTVIFMPMLMHSSFLDQQAKQ (SEQ ID NO: 261).

[0339] An isolated PTPRZ1_Skippingexon_{—}7_#PEP_NUM_{—}66 polypeptide, comprising a first amino acid sequence being at least about 90% homologous to amino acids 1-206 of PTPRZ1, and a second amino acid sequence being at least about 70%, optionally at least about 80%, preferably at least about 85%, more preferably at least about 90% and most preferably at least about 95% homologous to a polypeptide having the sequence VGCFCEVLTCNNLVMSC (SEQ ID NO: 262), wherein said first and said second amino acid sequences are contiguous and in a sequential order.

[0340] An isolated polypeptide corresponding to a tail of PTPRZ1_Skippingexon_{—}7_#PEP_NUM_{—}66, comprising a polypeptide having the sequence VGCFCEVLTCNNLVMSC (SEQ ID NO: 262).

[0341] An isolated RSU1_Skippingexon_{—}6_#PEP_NUM_{—}163 polypeptide, comprising a first amino acid sequence being at least about 90% homologous to amino acids 1-134 of RSU1, and a second amino acid sequence being at least about 70%, optionally at least about 80%, preferably at least about 85%, more preferably at least about 90% and most preferably at least about 95% homologous to a polypeptide having the sequence QP, wherein said first and said second amino acid sequences are contiguous and in a sequential order.

[0342] An isolated polypeptide corresponding to a tail of RSU1_Skippingexon_{—}6_#PEP_NUM_{—}163, comprising a polypeptide having the sequence QP.

[0343] An isolated SCTR_Skippingexon_{—}10_#PEP_NUM_{—}162 polypeptide, comprising a first amino acid sequence being at least about 90% homologous to amino acids 1-307 of SCTR, and a second amino acid sequence being at least about 70%, optionally at least about 80%, preferably at least about 85%, more preferably at least about 90% and most preferably at least about 95% homologous to a polypeptide having the sequence APGQVHSPADPPLWHPLHRLRLLPRGRYGDPAVF (SEQ ID NO: 263), wherein said first and said second amino acid sequences are contiguous and in a sequential order.

[0344] An isolated polypeptide corresponding to a tail of SCTR_Skippingexon_{—}10_#PEP_NUM_{—}162, comprising a polypeptide having the sequence APGQVHSPADPPLWHPLHRLRLLPRGRYGDPAVF (SEQ ID NO: 263).

[0345] An isolated TGFB2_Skippingexon_{—}5_#PEP_NUM_{—}165 polypeptide, comprising a first amino acid sequence being at least about 90% homologous to amino acids 1-251 of TGFB2, and a second amino acid sequence being at least about 70%, optionally at least about 80%, preferably at least about 85%, more preferably at least about 90% and most preferably at least about 95% homologous to a polypeptide having the sequence EMCRIIAAYVHFTLISRGI (SEQ ID NO: 264), wherein said first and said second amino acid sequences are contiguous and in a sequential order.

[0346] An isolated polypeptide corresponding to a tail of TQFB2_Skippingexon_{—}5_#PEP_NUM_{—}165, comprising a polypeptide having the sequence EMCRIIAAYVHFTLISRGI (SEQ ID NO: 264).

[0347] An isolated THBS1_Skippingexon_{—}12_#PEP_NUM_{—}183 polypeptide, comprising a first amino acid sequence being at least about 90% homologous to amino acids 1-591 of THBS1, and a second amino acid sequence being at least about 90% homologous to amino acids 643-1170 of THBS1, wherein said first and said second amino acid sequences are contiguous and in a sequential order.

[0348] An isolated polypeptide of an edge portion of THBS1_Skippingexon_{—}12_#PEP_NUM_{—}183, comprising a first amino acid sequence being at least about 90% homologous to amino acids 581-591 of THBS1 and a second amino acid sequence being at least about 90% homologous to amino acids 643-653 of THBS1, wherein said first said second amino acid sequences are contiguous and in a sequential order.

[0349] An isolated THBS1_Skippingexon_{—}4_#PEP_NUM_{—}180 polypeptide, comprising a first amino acid sequence being at least about 90% homologous to amino acids 1-209 of THBS1, and a second amino acid sequence being at least about 70%, optionally at least about 80%, preferably at least about 85% more preferably at least about 90% and most preferably at least about 95% homologous to a polypeptide having the sequence LPVSSSPLTTTW (SEQ ID NO: 265), wherein said first and said second amino acid sequences are contiguous and in a sequential order.

[0350] An isolated polypeptide corresponding to a tail of THBS1_Skippingexon_{—}4_#PEP_NUM_{—}180, comprising a polypeptide having the sequence LPVSSSPLTTTW (SEQ ID NO: 265).

[0351] An isolated THBS1_Skippingexon_{—}7_#PEP_NUM_{—}181 polypeptide, comprising a first amino acid sequence being at least about 90% homologous to amino acids 1-342 of THBS1, and a second amino acid sequence being at least about 70%, optionally at least about 80%, preferably at least about 85%, more preferably at least about 90% and most preferably at least about 95% homologous to a polypeptide having the sequence PATLRTMAGLHGPSGPPVLRAVAMEFSSAAAPAIASTTDVRAPRSRHGPAIFR SVTRDLNRMVAGATGPRGHLVL (SEQ ID NO: 266), wherein said first and said second amino acid sequences are contiguous and in a sequential order.

[0352] An isolated polypeptide corresponding to a tail of THBS1_Skippingexon_{—}7_#PEP_NUM_{—}181, comprising a polypeptide having sequence PATLRTMAGLHGPSGPPVLRAVAMEFSSAAAPAIASTTDVRAPRSRHGPAIFR SVTRDLNRMVAGATGPRGHLVL (SEQ ID NO: 266).

[0353] An isolated THBS1_Skippingexon_{—}9_#PEP_NUM_{—}182 polypeptide, comprising a first amino acid sequence being at least about 90% homologous to amino acids 1-373 of THBS1, and a second amino acid sequence being at least about 90% homologous to amino acids 432-1170 of THBS1, wherein said first and said second amino acid sequences are contiguous and in a sequential order.

[0354] An isolated polypeptide of an edge portion of THBS1_Skippingexon_{—}9_#PEP_NUM_{—}182, comprising a first amino acid sequence being at least about 90% homologous to amino acids 363-373 of THBS1, and a second amino acid sequence being at least about 90% homologous to amino acids 432-442 of THBS1, wherein said first and said second amino acid sequences are contiguous and in a sequential order.

[0355] An isolated THBS4_Skippingexon_{—}15_#PEP_NUM_{—}184 polypeptide, consisting essentially of an amino acid sequence being at least about 90% homologous to amino acids 1-613 of THBS4.

[0356] An isolated TIAF1_Skippingexon_{—}11_#PEP_NUM_{—}166 polypeptide, comprising a first amino acid sequence being at least about 90% homologous to amino acids 1-679 of TIAF1, and a second amino acid sequence being at least about 90% homologous to amino acids 674-2054 of TIAF1, wherein said first and said second amino acid sequences are contiguous and in a sequential order.

[0357] An isolated polypeptide of an edge portion of TIAF1_Skippingexon_{—}11_#PEP_NUM_{—}166, comprising a first amino acid sequence being at least about 90% homologous to amino acids 669-679 of TIAF1, and a second amino acid sequence being at least about 90% homologous to amino acids 674-684 of TIAF1, wherein said first and said second amino acid sequences are contiguous and in a sequential order.

[0358] An isolated TIAF1_Skippingexon_{—}25_#PEP_NUM_{—}167 polypeptide, comprising a first amino acid sequence being at least about 90% homologous to amino acids 1-1290 of TIAF1, and a second amino acid sequence being at least about 90% homologous to amino acids 133-2054 of TIAF1, wherein said first and said second amino acid sequences are contiguous and in a sequential order.

[0359] An isolated polypeptide of an edge portion of TIAF1_Skippingexon_{—}25_#PEP_NUM_{—}167, comprising a first amino acid sequence being at least about 90% homologous to amino acids 1280-1290 of TIAF1, and a second amino acid sequence being at least about 90% homologous to amino acids 1331-1341 of TIAF1, wherein said first and said second amino acid sequences are contiguous and in a sequential order.

[0360] An isolated TIAF_{—}1_Skippingexon_{—}34_#PEP_NUM_{—}168 polypeptide, comprising a first amino acid sequence being at least about 90% homologous to amino acids 1-1691 of TIAF1, and a second amino acid sequence being at least about 90% homologous to amino acids 1730-2054 of TIAF1, wherein said first and said second amino acid sequences are contiguous and in a sequential order.

[0361] An isolated polypeptide of an edge portion of TIAF1_Skippingexon_{—}34_#PEP_NUM_{—}168, comprising a first amino acid sequence; being at least about 90% homologous to amino acids 1681-1691 of TIAF1, and a second amino acid sequence being at least about 90% homologous to amino acids 1730-1740 of TIAF1, wherein said first and said second amino acid sequences are contiguous and in a sequential order.

[0362] An isolated VEGFC_Skipping_exon_{—}4_#PEP_NUM_{—}7 polypeptide, comprising a first amino acid sequence being at least about 90% homologous to amino acids 1-184 of VEGFC, and a second amino acid sequence being at least about 70%, optionally at least about 80%, preferably at least about 85%, more preferably at least about 90% and most preferably at least about 95% homologous to a polypeptide having the sequence VSGSEQDLPHQLHVE (SEQ ID NO: 267), wherein said first and said second amino acid sequences are contiguous and in a sequential order.

[0363] An isolated polypeptide corresponding to a tail of VEGFC_Skipping_exon_{—}4_#PEP_NUM_{—}7, comprising a polypeptide having the sequence VSGSEQDLPHQLHVE (SEQ ID NO: 267).

[0364] An isolated VLDLR_Skipping_exon_{—}14_#PEP_{—NUM}_{—}4 polypeptide, comprising a first amino acid sequence being at least about 90% homologous to amino acids 1-654 of VLDLR, and a second amino acid sequence being at least about 70%, optionally at least about 80%, preferably at least about 85%, more preferably at least about 90% and most preferably at least about 95% homologous to a polypeptide having the sequence VKIGVKKTWRMEDVNTYACQHHRLMITLQNIPVPVPVGTM (SEQ ID NO: 268), wherein said first and said second amino acid sequences are contiguous and in a sequential order.

[0365] An isolated polypeptide corresponding to a tail of VLDLR_Skippingexon_{—}14_#PEP_NUM_{—}4, comprising a polypeptide having the sequence VKIGVKKTWRMEDVNTYACQHHRLMITLQNIPVPVPVGTM (SEQ ID NO: 268).

[0366] An isolated VLDLR_Skipping_exon_{—}15_#PEP_NUM_{—}5 polypeptide, comprising a first amino acid sequence being at least about 90% homologous to amino acids 1-702 of VLDLR, and a second amino acid sequence being at least about 90% homologous to amino acids 752-873 of VLDLR, wherein said first and said second amino acid sequences are contiguous and in a sequential order.

[0367] An isolated polypeptide of an edge portion of VLDLR_Skipping_exon_{—}15_#PEP_NUM_{—}5, comprising a first amino acid sequence being at least about 90% homologous to amino acids 692-702 of VLDLR, and a second amino acid sequence being at least about 90% homologous to amino acids 752-762 of VLDLR, wherein said first and said second amino acid sequences are contiguous and in a sequential order.

[0368] An isolated VLDLR_Skipping_exon_{—}8_#PEP_NUM_{—}1 polypeptide, comprising a first amino acid sequence being at least about 90% homologous to amino acids 1-356 of VLDLR, and a second amino acid sequence being at least about 90% homologous to amino acids 357-873 of VLDLR, wherein said first and said second amino acid sequences are contiguous and in a sequential order.

[0369] An isolated polypeptide of an edge portion of VLDLR_Skipping_exon_{—}8_#PEP_NUM_{—}1, comprising a first amino acid sequence being at least about 90% homologous to amino acids 346-356 of VLDLR, and a second amino acid sequence being at least about 90% homologous to amino acids 357-367 of VLDLR, wherein said first and said second amino acid sequences are contiguous and in a sequential order.

[0370] An isolated VLDLR_Skipping_exon_{—}9_#PEP_NUM_{—}2 polypeptide, comprising a first amino acid sequence being at least about 90% homologous to amino acids 1-395 of VLDLR, and a second amino acid sequence being at least about 90% homologous to amino acids 438-873 of VLDLR, wherein said first and said second amino acid sequences are contiguous and in a sequential order.

[0371] An isolated polypeptide of an edge portion of VLDLR_Skipping_exon_{—}9_#PEP_NUM_{—}2, comprising a first amino acid sequence being at least about 90% homologous to amino acids 385-395 of VLDLR, and a second amino acid sequence being at least about 90% homologous to amino acids 438-448 of VLDLR, wherein said first and said second amino acid sequences are contiguous and in a sequential order.

[0372] An isolated VLDLR_intron_{—}8_retention_#PEP_NUM_{—}6 polypeptide, comprising a first amino acid sequence being at least about 90% homologous to amino acids 1-395 of VLDLR, and a second amino acid sequence being at least about 70%, optionally at least about 80%, preferably at least about 85%, more preferably at least about 90% and most preferably at least about 95% homologous to a polypeptide having the sequence GESKKKTWTLQVMGKDSMYLVRYRSSKTNSDFPPRY (SEQ ID NO: 269), wherein said first and said second amino acid sequences are contiguous and in a sequential order.

[0373] An isolated polypeptide corresponding to a tail of VLDLR_intron_{—}8_retention_#PEP_NUM_{—}6, comprising a polypeptide having the sequence GESKKKTWTLQVMGKDSMYLVRYRSSKTNSDFPPRY (SEQ ID NO: 269).

[0374] An isolated VLDLR_skipping_exon_{—}12_#PEP_NUM_{—}3 polypeptide, comprising a first amino acid sequence being at least about 90% homologous to amino acids 1-568 of VLDLR, and a second amino acid sequence being at least about 70%, optionally at least about 80%, preferably at least about 85%, more preferably at least about 90% and most preferably at least about 95% homologous to a polypeptide having the sequence PYKKSPLLA (SEQ ID NO: 270), wherein said first and said second amino acid sequences are contiguous and in a sequential order.

[0375] An isolated polypeptide corresponding to a tail of VLDLR_skipping_exon_{—}12_#PEP_NUM_{—}3, comprising a polypeptide having the sequence PYKKSPLLA (SEQ ID NO: 270).

[0376] An isolated VWF_Skippingexon_{—}13#PEP_NUM_{—}187 polypeptide, comprising a first amino acid sequence being at least about 90% homologous to amino acids 1-477 of VWF, and a second amino acid sequence being at least about 70%, optionally at least about 80%, preferably at least about 85%, more preferably at least about 90% and most preferably at least about 95% homologous to a polypeptide having the sequence AGPRLCREDLRPVWELQWQPGRGLPYPLWAGGAPGGGLRERLEAARGLPGP AEAAQRSLRPQPAHEGSPRRRARS (SEQ ID NO: 271), wherein said first and said second amino acid sequences are contiguous and sequential order.

[0377] An isolated polypeptide corresponding to a tail of VWF_Skippingexon_{—}13_#PEP_NUM_{—}187, comprising a polypeptide having the sequence AGPRLCREDLRPVWELQWQPGRGLPYPLWAGGAPGGGLRERLEAARGLPGP AEAAQRSLRPQPAHEGSPRRRARS (SEQ ID NO: 271).

[0378] An isolated VWF_Skippingexon_{—}29_#PEP_NUM_{—}188 polypeptide, comprising a first amino acid sequence being at least about 90% homologous to amino acids 1-1684 of VWF, and a second amino acid sequence being at least about 90% homologous to amino acids 1724-2813 of VWF, wherein said first and said second amino acid sequences are contiguous and in a sequential order.

[0379] An isolated polypeptide, of an edge portion of VWF_Skippingexon_{—}29_#PEP_NUM_{—}188, comprising a first amino acid sequence being at least about 90% homologous to amino acids 1674-1684 of VWF and a second amino acid sequence being at least about 90% homologous to amino acids 1724-1734 of VWF, wherein said first and said second amino acid sequences are contiguous and in a sequential order.

[0380] An isolated VWF_Skippingexon_{—}8_#PEP_NUM_{—}186 polypeptide, comprising a first amino acid sequence being at least about 90% homologous to amino acids 1-291 of VWF, a bridging amino acid K and a second amino acid sequence being at least about 90% homologous to amino acids 334-2813 of VWF, wherein said first amino acid sequence is contiguous to said bridging amino acid and said second amino acid sequence is contiguous to said bridging amino acid, and wherein said first amino acid sequence, said bridging amino acid and said second amino acid sequence are in a sequential order.

[0381] An isolated polypeptide of an edge portion of VWF_Skippingexon_{—}8_#PEP_NUM_{—}186, comprising a first amino acid sequence being at least about 90% homologous to amino acids 281-291 of VWF, a bridging amino acid K and a second amino acid sequence being at least about 90% homologous to amino acids 334-344 of VWF, wherein said first amino acid sequence is contiguous to said bridging amino acid and said second amino acid sequence is contiguous to said bridging amino acid, and wherein said first amino acid sequence, said bridging amino acid and said second amino acid sequence are in a sequential order.

[0382] An isolated FGF12_Skipping_exon_{—}2_long_isoform #PEP_NUM 38 polypeptide, comprising a first amino acid sequence being at least about 70%, optionally at least about 80%, preferably at least about 85%, more preferably at least about 90% and most preferably at least about 95% homologous to a polypeptide having the sequence MAAAIASSLIRQKRQARESNSDRVSASKRRSSPSKDGRSLCERHVLGVFSKVR FCSGRKRPVRRRPA (SEQ ID NO: 272), and a second amino acid sequence being at least about 90% homologous to amino acids 43-181 of FGF12, wherein said first and second amino acid sequences are contiguous and in a sequential order.

[0383] The present invention successfully addresses the shortcomings of the presently known configurations by providing a method for large-scale prediction of alternative splicing events.

[0384] Unless otherwise defined, all technical and scientific terms used herein have the same meaning as commonly understood by one of ordinary skill in the art to which this invention belongs. Although methods and materials similar or equivalent to those described herein can be used in the practice or testing of the present invention, suitable methods and materials are described below. In case of conflict, the patent specification, including definitions, will control. In addition, the materials, methods, and examples are illustrative only and not intended to be limiting.

### BRIEF DESCRIPTION OF THE DRAWINGS

[0385] The invention is herein described, by way of example only, with reference to the accompanying drawings. With specific reference now to the drawings in detail, it is stressed that the particulars shown are by way of example and for purposes of illustrative discussion of the preferred embodiments of the present invention only, and are presented in the cause of providing what is believed to be the most useful and readily understood description of the principles and conceptual aspects of the invention. In this regard, no attempt is made to show structural details of the invention in more detail than is necessary for a fundamental understanding of the invention, the description taken with the drawings making apparent to those skilled in the art how the several forms of the invention may be embodied in practice.

[0386] In the drawings:

[0387] FIGS. 1a-e are graphs depicting the differences between alternative and constitutive exons as determined by analyzing human exon datasets (FIGS. 1a-c) and comparing human-mouse exon datasets (FIGS. 1d-e). For each of the curves, constitutive exons are denoted by squares, and alternative exons are denoted by diamond shapes. FIG. 1a—Length of conserved region in the last 100 nucleotides of an upstream intron flanking the exon. X axis, length of conserved region; Y axis, percent exons with upstream conserved region greater or equal to the value in X. Conservation was detected using local alignment with the mouse 100 counterpart intronic nucleotides. A minimum hit was 12 consecutive perfectly matching nucleotides. FIG. 1b—Length of conserved region in the first 100 nucleotides of a flanking intron downstream of the exon. Axes as in A. FIG. 1c shows human-mouse exon identity for percent exons. X axis, percent identity in the alignment of the human and the mouse exons; Y axis, percent exons with identity greater or equal to the value in X. FIG. 1d shows exon size distribution. X axis, exon size; Y axis, percent exons having size lesser or equal to the size in X. FIG. 1e shows human-mouse exon identity, for exons having a size that is a multiple of 3. X axis, percent identity in the alignment of the human and the mouse exons; Y axis, percent exons with identity greater or equal to the value in X.

[0388] FIG. 2a is a photograph depicting RT-PCR detection of a splice variant featuring skipping of exon 10 in Ephrine receptor B1 (GenBank Accession No. NM_{—}004441, SEQ ID Nos. 452, 453). Primers were taken from exon 9 (f, SEQ ID NO: 3) and 11 (r, SEQ ID NO: 4) of Ephrine receptor B1. Predicted size of full-length product was 324 bp, which was found in all samples but Placenta (lane 4). Skipping exon 10 variant (predicted size 201 bp) was detected in Testis (lane 11—Arrow) and slightly in Kidney (lane 12). A larger band was also found in Testis, and sequencing confimed it was a novel exon upstream of exon 10 (9A—Arrowhead, sequence of 3′ of exon 9a is set forth in SEQ ID NO: 201). All sequences were confirmed by sequencing. Tissue type cDNA, pools: 1—Cervix+HeLa; 2—Uterus; 3—Ovary; 4—Placenta; 5—Breast; 6—Colon; 7—Pancreas; 8—Liver+Spleen; 9—Brain; 10—Prostate; 11—Testis; 12—Kidney; 13—Thyroid; 14—Assorted Cell-lines. M denotes a 1 kb ladder marker; H denotes H₂O negative control.

[0389] FIG. 2b is a photograph depicting RT-PCR detection of a splice variant featuring skipping of exon 4 in VEGFC (GenBank Accession No. NM_{—}005429, SEQ ID Nos. 466, 467) Primers were taken from exon 3 (f, SEQ ID NO: 17) and 6 (r, SEQ ID NO: 18). Predicted size of full-length product was 351 bp, which was found in all samples. Skipping exon 4 variant (predicted sized 199 bp) was detected in all samples excluding Pancreas (lane 7) and a very weak expression in Breast and Colon (lanes 5 and 6). All sequences were confirmed by sequencing. A larger band was apparent in the testis and may represent a novel variant of VEGFC which sequence is yet to be determined. Tissue type cDNA pools: 1—Cervix+HeLa; 2—Uterus; 3—Ovary; 4—Placenta; 5—Breast; 6—Colon; 7—Pancreas; 8—Liver+Spleen; 9—Brain; 10—Prostate; 11—Testis; 12—Kidney; 13—Thyroid; 14—Assorted Cell-lines. M denotes a 1 kb ladder marker; H denotes H₂O negative control.

[0390] FIG. 2c is a photograph depicting RT-PCR detection of a splice variant featuring skipping of exon 4 in EphrinA5 (GenBank Accession No. NM_{—}001962, SEQ ID Nos. 450, 451) and a second splice variant featuring skipping of exon 11 in Heparanase 2 (GenBank Accession No. NM_{—}021828, SEQ ID Nos. 468, 469). Primers were taken from exon 1 (f, SEQ ID NO: 1) and 5 (r, SEQ ID NO: 2) for EFNA5 and exon 9 (f, SEQ ID NO: 19) and 12 (r, SEQ ID NO: 20) for HPA2. Predicted size of full length EFNA5 product was 287 bp, which was found in all samples (samples 1-8 not shown). Skipping exon 4 variant (predicted size 199 bp) was detected in all samples. Predicted size of full length HPA2 product (357 bp) was detected in all samples, excluding Breast and Pancreas (lanes 5 and 7). Skipping exon variant of HPA2 (199 bp) was found in Cervix (lane 1), Uterus (2), Prostate (10), Testis (11) and Kidney (1-2). In testis, two Novel exons were found and confirmed by sequencing (exons 11A and 11B, partial sequences are set forth in SEQ ID Nos: 203 and 204, respectively). All sequences were confirmed by sequencing.

[0391] FIG. 2d is a photograph depicting RT-PCR detection of a splice variant featuring skipping of exon 2 in FGF11 (GenBank Accession No. NM_{—}004112, SEQ ID Nos. 456, 457). Primers were taken from exon 1 (f, SEQ ID NO: 5) and 4 (r, SEQ ID NO: 6). Predicted full-length product was 344 bp, which was found in all samples. Skipping exon 2 variant (predicted size 233 bp) was detected in all samples excluding Uterus (lane 2), Placenta (lane 4), Colon (lane 6), Pancreas (lane 7), Brain (lane 9), Cell-lines (Lane 14) and very weakly in Breast and Liver and Spleen (lanes 5 and 8). All sequences were validated by sequencing. Tissue type cDNA pools: 1—Cervix+HeLa; 2—Uterus; 3—Ovary; 4—Placenta; 5—Breast; 6—Colon 7—Pancreas; 8—Liver+Spleen; 9—Brain; 10—Prostate; 11—Testis; 12—Kidney; 13—Thyroid; 14—Assorted Cell-lines. M denotes a 1\kb ladder marker; H denotes H₂O negative control.

[0392] FIG. 2e is a photograph depicting RT-PCR detection of a splice variant featuring skipping of exon 9 in NOTCH2 (GenBank Accession No. NM_{—}024408, SEQ ID Nos. 460, 461). Primers were taken from exon 8 (f, SEQ ID NO: 11) and 10 (r, SEQ ID NO: 12). Predicted full-length product was 352 bp, which was found only in Cervix and Breast. Skipping exon 9 variant (predicted size 169 bp) was detected in Testis (Lane 11—Marked by Arrow). Tissue type cDNA pools: 1—Cervix+HeLa; 2—Uterus; 3—Ovary; 4—Placenta; 5—Breast; 6—Colon; 7—Pancreas; 8—Liver+Spleen; 9—Brain; 10—Prostate; 11—Testis; 12—Kidney; 13—Thyroid; 14—Assorted Cell-lines. M denotes a 1 kb ladder marker; H denotes H₂O negative control.

[0393] FIG. 2f is a photograph depicting RT-PCR detection of a splice variant featuring skipping of exon 13, in PTPRZ1 (GenBank Accession No. NM_{—}002851, SEQ ID Nos. 464, 465). Primers were taken from the junction of exons 12-13 (f, SEQ ID NO: 15) and exons 14-15 junction (r, SEQ ID NO: 16). Predicted size of full-length product was 283 bp, which was found in Cervix (lane 1), Uterus (lane 2), Ovary (lane 3), Brain (lane 9), Prostate (lane 10) and Testis (lane 11). Exon 13 skipping (138 bp) was detected in Cervix (Lane 1), Ovary (lane 3), Brain (lane 9) and Testis (lane 11). All sequences were confirmed by sequencing. Tissue type cDNA pools: 1—Cervix+HeLa; 2—Uterus; 3—Ovary; 4—Placenta; 5—Breast; 6—Colon; 7—Pancreas; 8—Liver+Spleen; 9—Brain; 10—Prostate; 11—Testis; 12—Kidney; 13—Thyroid; 14—Assorted Cell-lines. M denotes 1 kb ladder marker; H denotes H₂O negative control.

[0394] FIG. 2g is a photograph depicting RT-PCR detection of splice variants featuring skipping of exons 13 and 14 in NTRK2 (GenBank Accession No. NM_{—}006180, SEQ; ID Nos. 462, 463). Primers were taken from exon 11-12 junction (f, SEQ ID NO: 13) and 15 (r, SEQ ID NO: 14). Predicted product of full-length product was 400 bp, which was found in all tissue samples excluding Placenta (lane 4), Breast (lane 5), Liver and Spleen (lane 8) and Cell-lines (lane 14). Exon 13 skipping (known—352 bp) was detected in all tissue samples excluding Placenta (lane 4), Liver and Spleen (lane 8) and Cell-lines (lane 14). Skipping both exons 13 and 14 (139 bp) was weakly found in Prostate (marked by an Arrow). All sequences were validated by sequencing. The sequence identity of the larger bands (e.g., 500 bp in lane 11) was not determined. Tissue type cDNA pools: 1—Cervix+HeLa; 2—Uterus; 3—Ovary; 4—Placenta; 5—Breast; 6—Colon; 7—Pancreas; 8—Liver+Spleen; 9—Brain; 10—Prostate; 11—Testis; 12—Kidney; 13—Thyroid; 14—Assorted Cell-lines. M denotes 1 kb ladder marker; H denotes H₂O negative control.

[0395] FIG. 2h is a photograph depicting RT-PCR detection of a splice variant featuring retention of intron 8 in Very Low Density Lipoprotein receptor (GenBank Accession No. NM_{—}003383 SEQ ID Nos. 457, 458). Primers were taken from exon 7-8 junction (f, SEQ D. NO: 7) and 10 (r, SEQ ID NO: 8). Predicted size of full-length product was 324 bp, which was found in all tissue samples excluding Brain (lane 9). Retention of intron 8 (predicted, size 427 bp) was detected in all tissue samples excluding Placenta (lane 4), Colon (lane 6), and Brain (lane 9). All sequences were confirmed by sequencing Tissue type cDNA pools: 1—Cervix+HeLa; 2—Uterus; 3—Ovary; 4—Placenta; 5—Breast; 6—Colon; 7—Pancreas; 8—Liver+Spleen; 9—Brain; 10—Prostate; 11—Tests; 12—Kidney; 13—Thyroid; 14—Assorted Cell-lines M denotes 1 kb ladder marker; H denotes H₂O negative control.

[0396] FIG. 2i is a photograph depicting RT-PCR detection of a first splice variant featuring skipping of exon 6 and a second splice variant featuring new exon 8a in FSH receptor (GenBank Accession No. NM_{—}000145, SEQ ID Nos. 459, 460). Primers were taken from exon 5 (f, SEQ ID NO: 9) and 10 (r, SEQ ID NO: 10). Predicted size of full-length product was 394 bp, which was found in Ovary, Testis and Thyroid (lanes 3, 11 and 13 respectively). Skipping exon 6 variant predicted size 316 bp—arrowhead) was detected in Ovary and Testis (lanes 3, 11). A larger band was also found in Ovary and Testis, and sequencing approved it was a novel exon upstream to exon 9 (was called 8a, SEQ ID NO: 202). All sequences were confirmed by sequencing Tissue type cDNA pools: 1—Cervix+HeLa, 2—Uterus; 3—Ovary; 4—Placenta; 5—Breast; 6—Colon; 7—Pancreas, 8—Liver+Spleen; 9—Brain; 10—Prostate; 11—Testis; 12—Kidney; 13—Thyroid; 14—Assorted Cell-lines. M denotes 1 kb ladder marker; H denotes H₂O negative control.

[0397] FIG. 2j is a photograph showing experimental validation for the existence of alternative splicing in selected predicted exons. RT-PCR for 15 exons (detailed in Table 8), for which no EST/cDNA indicating alternative splicing was found was conducted over 14 different tissue types and cell lines (see Methods). Detected splice variants were confirmed by sequencing. For nine of these exons a splice isoform was detected in at least one of the tissues tested. Only a single tissue is shown here for each of these nine exons. Lane 1, DNA size marker. Lane 2, exon 2 skipping in FGF11 in ovary, tissue (the 344 nt and 233 nt products are exon inclusion and skipping, respectively). Lane 3, exon 4 skipping in EFNA5 gene in ovary tissue (exon inclusion 287 nt; skipping 199 nt); Lane 4, exon 8 skipping in NCOA1 gene in placenta tissue (exon inclusion 377 nt; skipping 275 nt). Lane 5; exon 22 skipping in PAM gene in cervix tissue (exon inclusion 323 nt; skipping 215 nt). Additional upper band contains a novel exon in PAM. Lane 6, exon 9 skipping in GOLGA4 gene in uterus tissue (exon inclusion 288 nt; skipping 213 nt). Lane 7, exon 9 skipping of NPR2 gene in placenta tissue (282 nt inclusion; 207 nt; skipping). Lane 8, intron 8 retention in VLDLRV gene in ovary tissue (wild type 324 nt; intron retention 427 nt). Lane 9, alternative acceptor site in exon 12 of BAZ1A in ovary tissue (wild type 351 nt; alternative acceptor; variant 265 nt). The uppermost band represents a new exon in BAZ1A, inserted between; exons 12 and 13. Lane 10, alternative acceptor site in exon 7 of SMARCD1 in uterus tissue (wild type 353 nt; exon 7 extension 397 nt).

[0398] FIGS. 3a-z are schematic presentations of the proteins encoded by the selected splice variants compared to full length wild type proteins. A full description of the new variants is provided in Table 3, below. The protein domains are based on Swissprot annotation. FIG. 3a shows new alternatively spliced variants of VLDLR—Very low density Lipoprotein Receptor. The exon structure of the new variant is as follows: i. skipping exon 8 or 9; ii. extension of exon 8; iii. skipping exon 14; iv. skipping exon 15.

[0399] FIG. 3b shows a new alternatively spliced variant of VEGFC—Vascular endothelial growth factor C. The new variant skips exon 4.

[0400] FIG. 3c shows three new alternatively spliced variants of MET protooncogene, (HGF receptor). Exon structure of the new variants is as follows: i. extension of exon 12; ii. skipping of exon 4; iii skipping exon 18.

[0401] FIG. 3d shows four new alternatively spliced variants of ITGAV, integrin, alpha V (vitronectin receptor, alpha polypeptide). The exon structure of the new variants is as follows: i. skipping exon 11; ii. skipping exon 20; iii. skipping exon 21; iv. skipping exon 25.

[0402] FIG. 3e shows three new alternatively spliced variants of FSHR: follicle stimulating hormone receptor. The exon structure of the new variants is as follows: i. skipping exon 7; ii. skipping exon 8, iii. intron 7 retention.

[0403] FIG. 3f shows new alternatively spliced variants of LHCGR: luteinizing hormone/choriogonadotropin receptor. The exon structure of the new variants is as follows: i. skipping either exon 2, 3, 5, 6 or 7; ii. skipping exon 10; iii. intron 5 retention.

[0404] FIG. 3g shows a new alternatively spliced variant of Fibroblast growth factor—FGF11. The exon structure of the new variant new variant skips exon 2.

[0405] FIG. 3h shows two new alternatively spliced variants of Fibroblast growth factors—FGF12/13. The known FGF protein has two reported isoforms (isoform 1 and 2). The exon structure of the new splice variants is as follows: i. skipping exon 2 in both, isoform 1 and isoform 2; and ii. skipping exon 3 in both, isoform 1 and isoform 2.

[0406] FIG. 3i shows new alternatively spliced variants of Ephrin ligand A family proteins, EFNA 1, 3 and 5. The exon structure of the novel splice variants is as follows: i. skipping exon 3 in EFNA 13 and 5; ii. skipping exon 4 in EFNA 3 and 5; iii. skipping both exons 3 and 4 in EFNA 1, 3 and 5.

[0407] FIG. 3j shows three new alternatively spliced variants of Ephrin ligand B family (EFNB2). The exon structure of the new variants is as follows: i. skipping exon 2; ii. skipping exon 3; iii. skipping exon 4.

[0408] FIG. 3k shows four new alternatively spliced variants of Ephrin type A receptor 4 (EPHA4). The exon structure of the new variants is as follows: i. skipping exon 2; ii. skipping exon 3; iii. skipping exon 4; iv. skipping exon 12.

[0409] FIG. 3l shows seven new alternatively spliced variants of Ephrin type A receptor 5 (EPHA5). The exon structure of the new variants is as follows: i. skipping exon 4; ii. skipping exon 5; iii. skipping exon 8; iv. skipping exon 10; v. skipping exon 14; vi. skipping exon 17.

[0410] FIG. 3m shows two new alternatively spliced variants of Ephrin type A receptor 7 (EPHA7). The exon structure of the new variants is as follows: i. skipping exon 10; ii. skipping exon 15.

[0411] FIG. 3n shows three new alternatively spliced variants of Ephrin type B receptor 1 (EPHB1). The exon structure of the new variants is as follows: i. skipping exon 6; ii. skipping exon 8; iii. skipping exon 10.

[0412] FIG. 3o shows five new alternatively spliced variants of PTPRZ1—protein tyrosine phosphatase zeta 1. The exon structure of the new variants is as follows: i. skipping exon 7; ii. skipping exon 11, iii. skipping exon 13, iv. skipping exon 15; v. skipping exon 22.

[0413] FIG. 3p shows a new alternatively spliced variant of PTPRB1—protein tyrosine phosphatase beta 1. The new variant skips exon 26.

[0414] FIG. 3q shows new splice variants of ErbB2 and ErbB3 receptor tyrosine kinases. The exon structure of the new variants is as follows. i. new splice variant of ErbB2, skipping exon 6; ii. new splice variant of ErbB3 skipping exon 4; iii. new splice variant of ErbB3 skipping exon 15; iv. new splice variant of ErbB3, skipping exon 18.

[0415] FIG. 3r shows two new alternatively spliced variants of ErbB4 receptor tyrosine kinase. The exon structure of the new variants is as follows: i. skipping exon 14; ii. skipping exon 16.

[0416] FIG. 3s shows a new alternatively spliced variant of, Heparanase, skipping exon 10.

[0417] FIG. 3t shows seven new alternatively spliced variants of Heparanase 2. The exon structure of the new variants is as follows: i. skipping exon 5; ii. skipping exon 6; iii. skipping exon 7; iv. skipping exon 8; v. skipping exon 9; vi. skipping exon 10; vii. skipping exon 11.

[0418] FIG. 3u shows two new alternatively spliced variants of KIT oncogene (Tyrosine kinase receptor). The exon structure of the new variants is as follows: i. skipping exon 8; ii. skipping exon 14.

[0419] FIG. 3v shows a new alternatively spliced variant of KIT ligand, skipping exon 8.

[0420] FIG. 3w shows new alternatively spliced variants of JAG1. The exon structure of the new variants is as follows: i. skipping exon 10 or 18; ii. skipping exon 12; iii. skipping exon 22.

[0421] FIG. 3x shows new alternatively spliced variants of Notch homologs NTC2, NTC3 and NTC4. The exon structure new variants is as follows: i. is a new variant of NTC2, skipping exon 9 or 12; ii. is a new variant of NTC3, skipping exon 3; iii. is a new variant of NTC4, skipping exon 8.

[0422] FIG. 3y shows new alternatively spliced variants of BDNF/NT-3 growth factors receptors (NTRK2 and NTRK3). The exon structure of the new variants is as follows: i. is a new variant of NTRK2, skipping exon 14; ii. is a new variant of NTRK2, skipping exon 13 and 14; iii. is a new variant of NTRK3, skipping exon 5; iv. is a new variant of NTRK3, skipping exon 16.

[0423] FIG. 3z shows new alternatively spliced variants of GDNF receptor alpha (GFRA1) and Neurturin receptor alpha (GFRA2)-RET ligands. The exon structure of the new variants is as follows: i. is a new variant of GFRA1, skipping exon 4; ii. is a new variant of GFRA2, skipping exon 4.

[0424] FIGS. 4a-m are schematic presentations of the proteins encoded by the selected splice variants compared to full length wild type proteins. A full description of the new variants is provided in Table 3, below. The protein domains are based on Swissprot annotation.

[0425] FIG. 4a shows new alternatively spliced variants of Interleukin 16. The exon structure of the new variants is as follows: i. skipping exon 5; ii. skipping exon 18.

[0426] FIG. 4b shows new alternatively spliced variants of Insulin growth factor binding protein 4, IGFBP4, skipping exon 3.

[0427] FIG. 4c shows new alternatively spliced variants, of Angiopoietin 1. The exon structure of the new variants is as follows: i. skipping exon 5; ii. skipping exon 6; iii. skipping exon-8.

[0428] FIG. 4d shows new alternatively spliced variants of long and short isoforms of Neuropilin 1. The exon structure of the new variants is as follows: i. is a new variant of a long isoform, skipping exon 5; ii is a new variant of a short isoform, skipping exon 5.

[0429] FIG. 4e shows new alternatively spliced variant of Endothelin converting enzyme 1, skipping exon 2.

[0430] FIG. 4f shows new alternatively spliced variants of Endothelin converting enzyme 2. The exon structure of the new variants is as follows: i. skipping exon 8; ii. skipping exon 12, iii. skipping exon 13; iv. skipping exon 15.

[0431] FIG. 4g shows new alternatively spliced variants of Enkephalinase, Neutral endopeptidase (NME). The exon structure of the new variants is as follows: i. skipping exon 4; ii. skipping exon 7; iii. skipping exon 9; iv. skipping exon 11; v. skipping exon 12; vi. skipping exon 16.

[0432] FIG. 4h shows new alternatively spliced variants of APBB1—Alzheimer's disease amyloid A4 binding protein. The exon structure of the new variants is as follows: i. skipping exon 3; ii. skipping exon 7 or 9; iii. skipping exon 10; iv skipping exon 12.

[0433] FIG. 4i shows new alternatively spliced variant of Transforming growth factor beta 2 (TGFB2), skipping exon 5.

[0434] FIG. 4j shows new alternatively spliced variant of IL1 receptor accessory, protein (IL1RAP), skipping exon 11.

[0435] FIG. 4k shows new alternatively spliced variants of IL1 receptor accessory protein like family members IL1RAPL1 and IL1 RAPL2. The exon structure of the new variants is as follows: i. skipping exon 4; ii. skipping exon 5; iii. skipping exon 6; iv. skipping exon 7; v. skipping exon 8.

[0436] FIG. 4l shows new alternatively spliced variant of Vitamin K dependent protein S precursor (PROS1), skipping exon 3.

[0437] FIG. 4m shows new alternatively spliced variants of Ovarian carcinoma antigen CA125 (M17S2). The exon structure of the new variants is as follows: i. skipping exon 14; ii. skipping exon 15; iii. skipping exon 20.

[0438] FIG. 5a is a black box diagram illustrating a system designed and configured for generating a database of putative gene products and generated according to the teachings of the present invention.

[0439] FIG. 5b is a black box diagram illustrating a remote configuration of the system of FIG. 5a.

[0440] FIG. 6 shows the ROC curve of classification rules in the experiments according to the present invention.

### DESCRIPTION OF THE PREFERRED EMBODIMENTS

[0441] The present invention is of methods of identifying putative gene products by interspecies sequence comparison and biomolecular sequences identified thereby, which can be used in a variety of therapeutic and diagnostic applications.

[0442] The principles and operation of the present invention may be better understood with reference to the drawings and accompanying descriptions.

[0443] Before explaining at least one embodiment of the invention in detail, it is to be understood that the invention is not limited in its application to the details set forth in the following description or exemplified by the Examples. The invention is capable of other embodiments or of being practiced or carried out in various ways. Also, it is to be understood that the phraseology and terminology employed herein is for the purpose of description and should not be regarded as limiting.

[0444] Alternative splicing is a mechanism by which multiple expression products are generated from a single gene. It is estimated that between 35% to 60% of all human genes can putatively undergo alternative splicing. Currently, the only approach available for the detection of alternatively spliced products relies on the use of expressed sequence data, such as, Expressed Sequence Tags (ESTs) and cDNAs.

[0445] However, expressed sequences present a problematic source of information, as they present only a sample of the transcriptome. Thus, the detection of a splice variant is possible only if it is expressed above a certain expression level, or if there is an EST library prepared from the tissue type in which the variant is expressed. In addition, ESTs are very noisy and contain numerous sequence errors [Sorek (2003) Nucleic Acids Res. 31:1067-1074]. For example, many wrongly termed splice events, actually represent incompletely spliced heteronuclear RNA (hnRNA) or oligo(dT)-primed genomic DNA contaminants of cDNA library constructions. Furthermore, the splicing apparatus is known to make errors, resulting in aberrant transcripts that are degraded by the mRNA surveillance system and amount to little that is functionally important [Maquat and Charmichael (2001) Cell 104:173-176; Modrek and Lee (2001) Nat. Genet. 30:13-19]. Consequently the mere presence of a transcript isoform in the ESTs cannot establish a functional role for it.

[0446] Thus, the use of expressed sequence data allows only very genera estimates regarding the number of genes that have splice variants (currently running between 35% and 75%), but does not allow specific estimation regarding the actual number and identity of exons that can be alternatively spliced.

[0447] While reducing the present invention to practice, the present inventors uncovered a combination of sequence features unique to alternatively spliced exons, which allow distinction thereof from constitutively spliced ones. These findings allow to computationally identify alternatively spliced exons even when no expressed sequence data is available, to thereby predict yet unknown gene expression products.

[0448] Thus, according to one aspect of the present invention there is provided a method of identifying alternatively spliced exons.

[0449] As used herein “alternatively spliced exons” refer to exons, which are spliced into an expression product only under specific conditions such as specific tissue environment, stress conditions or development state.

[0450] The method according to this aspect of the present invention is effected by scoring each of a plurality of exon sequences derived from genes of a species (i.e., a eukaryotic organism such as human) according to at least one sequence parameter. Exon sequences of the plurality of exon sequences scoring above a predetermined threshold represent alternatively spliced exons, thereby identifying the alternatively spliced exons.

[0451] Typically, exon sequences are identified by screening genomic data for reliable exons which require canonical splice sites and elimination of possible genomic contamination events [Sorek (2003) Nucleic Acids Res. 31:1067-1074].

[0452] As mentioned hereinabove, the present inventors uncovered a number of sequence parameters, which can serve for the identification of alternatively spliced exon sequences. Preferred examples of such are summarized infra.

[0453] Exon length—Typically, conserved alternatively spliced exons are much shorter than constitutively spliced exons, probably since the spliceosome typically recognizes exons that are between 50 and 200 bp.

[0454] Division by three—Since, alternatively spliced exons are cassette exons, which may be incorporated in an expressed gene product or skipped, they should be divisible by three, such that the reading frame is maintained when they are skipped.

[0455] Conservation level between the exon sequences and corresponding exon sequences of ortholohgous species—Alternatively spliced exons are typically more conserved than constitutively spliced exons. This is probably since alternatively spliced exons contain sub-sequences that are important for inclusion/exclusion regulation [Exonic Splicing” Enhancers and Silencers, Cartegni (2002) Nat. Rev. Genet. 3:285-298]. This requirement imposes additional conservation constraint on the sequence of the exon.

[0456] Length of conserved intron sequences upstream of each of the exon sequences—Alternatively spliced exons exhibit high level of conservation in an intronic sequence of about 100 bases upstream of the exon. This is only sparsly so for constitutively spliced exons. This is probably since these sequences are involved regulation of inclusion/exclusion of the alternatively spliced exon. Alignment of intronic regions can be done using sim4 software. sim4 sources are available from http://globin.cse.psu.edu/globin/html/software.html. According to a presently known embodiment of the present invention the length of conserved intronic sequence is from about 12 to about 100 nucleotides.

[0457] Length of conserved intron sequences downstream of the exon sequences—Alternatively spliced exons exhibit high level of conservation in an intronic sequence of about 100 bases downstream of the exon. This is only sparsly so for constitutively spliced exons. This is probably since these sequences are involved in regulation of inclusion/exclusion of the alternatively spliced exon. Alignment of intronic regions can be done using sim4 software. sim4 sources are available from http://globin.cse.psu.edu/globin/html/software.html. According to a presently known embodiment of the present invention the length of conserved intronic sequence is from about 12 to about 100 nucleotides.

[0458] Conservation level of intron sequences upstream of each of the exon sequences—For alternatively spliced exons, the intronic sequences in the 100 bases upstream of the exon are frequently conserved between species. This correlation is less strongly shown by constitutively spliced exons [Sorek and Ast (2003) Genome Res. 13(7):1631-7]. This is probably since these sequences are involved in regulation of inclusion/exclusion of the alternatively spliced exon. Therefore, conservation level of intron sequences upstream of exon sequences can be used to distinguish alternative from constitutive exons. Alignment of intronic regions can be done using sim4 software, which may be obtained from http://globin.cse.psu.edu/globin/html/software.html. The measured length of the conserved sequence was generally found to be between 12 to 100 nucleotides.

[0459] Conservation level of intron sequences downstream of each of the exon sequences—For alternatively spliced exons, the intronic sequences in the 100 bases downstream of the exon are frequently conserved between species. This correlation is less strongly shown by constitutively spliced exons. This is probably since these sequences are involved in regulation of inclusion/exclusion of the alternatively spliced exon. Therefore, conservation level of intron sequences downstream of exon sequences can be used to distinguish alternative from constitutive exons. Alignment of intronic regions can be done using sim4 software, which are available from http://globin.cse.psu.edu/globin/html/software.html.

[0460] Each of the above-described parameters can be considered separately according to predetermined criteria however a combination with other parameters used, is preferred. In this case, each parameter is preferably also weighted according to its importance and a scoring system e.g., a scoring matrix, is preferably applied.

[0461] Such a scoring matrix can list the various exons across the X-axis of the matrix while each parameter can be listed on the Y-axis of the matrix. Parameters include both a predetermined range of values from which a single value is selected from each exon, and a weight. Each exon is scored at each parameter according to its value and the weight of the parameter.

[0462] Finally, the scores of each parameter of a specific exon sequence are summed and the results are analyzed.

[0463] Exons which exhibit a total score greater than a particular stringency threshold are grouped as alternatively spliced exons.

[0464] According to presently known preferred embodiments of this aspect of the present invention the best scored exons share at least about 95% identity with an ortholohgous exon; exon size is a multiple of 3; exon length of about 1000 bases; length of conserved intron sequences upstream of the exon sequence is at least about 12 bases; length of conserved intron sequences downstream of the exon sequence is at least about 15 bases; conservation level of the intron sequences upstream of the exon sequence is at least about 85%; conservation level of the intron sequences downstream of the exon sequence is at least about 60%.

[0465] As mentioned, the above-described methodology allows the prediction of yet unknown alternatively spliced exons, even in the absence of available expressed sequences. This allows the prediction of putative gene products of any known gene

[0466] Thus in order to predict expression products of a gene of interest, alternatively spliced exons thereof are identified as described above. Thereafter, chromosomal location of the identified exons is analyzed with respect to the coding sequence of the gene of interest, to thereby predict expression products of the gene of interest.

[0467] Chromosomal location of the newly uncovered sequences may be done as described by aligning the new sequence to the genome, as described for example by Modrek (2001) Nucleic Acids Research, 29:2850-2859. Genomic sequences, which are found to include these exons, are then manipulated to exclude them to thereby generate the new isoforms.

[0468] For example, when the newly identified alternative exon is predicted to be skipped, all transcripts that are known to include it are computationally or manually manipulated to delete the sequence of the exon therefrom, thus creating a new transcript that represents the exon-skipping splice variant.

[0469] Once putative transcripts are identified using the above methodology, corresponding protein products can be predicted using any translation software known in the art [e.g., ORF-finder (http://ww.nbi.nlm.rih.gov/gorf/gorf.html)].

[0470] According to another aspect of the present invention there is provided a method of predicting expression products of a gene of interest in a given species (any eukaryotic organism). The method according to this aspect of the present invention is effected by clustering expressed sequences of the given species to form a contig.

[0471] The term “contig” refers to a series of overlapping sequences with sufficient identity to create a longer contiguous sequence.

[0472] Expressed sequence clustering is effected using clustering methods which are well known in the art. Examples of clustering/assembly procedures with associated databases which are commercially available include, but are not limited to, UniGene (http://www.ncbi.nlm.nih.gov/UniGene), TIGR Gene Indices (http://www.tigr.org/tdb/tgi.shtml), STACKED (http://www.sanbi.ac.za/Dbases.html), trEST (ftp://ftp.isrec.isb_sib.ch/gub/databases/trest) and LEADS™ (http://www.cgen.com).

[0473] Following contig construction, exon sequences of orthologues of the gene of interest which display homology with the contig sequence are aligned to a genome of interest (i.e., genome of the given species). Orthologous exon sequences which alignment overlaps the chromosomal location of the given contig are added to the set of sequences in the contig. This larger set of sequences is then assembled to form a hybrid multi-species contig.

[0474] Expression products that are unique to the hybrid contig and do not appear in the original contig are identified. It will be appreciated that such unique expression products could not have been identified using prior art methods, which do not utilize expressed sequences from other species.

[0475] The above-described methodology is further described in Example 4 of the Examples section.

[0476] Once novel transcripts of the gene of interest the given species are identified, their corresponding protein products are predicted, as described above.

[0477] Biomolecular sequences uncovered as described herein can be experimentally validated using any method known in the art, such as northern blot, RT-PCR, western-blot and the like. For further details see Example 2 of the Examples section. Functional analysis of biomolecular sequences identified as described herein can be effected using biochemical, cell-biology and molecular methods which are well known in the art.

[0478] Biomolecular sequences (i.e., nucleic acid and polypeptide sequences) uncovered using the above-described methodology can be functionally annotated to discover their contribution to biological processes and physiological complexity. Numerous methods of automated gene annotation are known in the art (reviewed by Ashsurst and Collins (2003) Annu. Rev. Genomics Hum. Genet. (2003) 4:69-88. Such automatic annotation approaches are summarized in Example 5 of the Examples section below and are also the subject of U.S. Pat. Appl. No. 60/539,129.

[0479] Alternatively spliced exons and/or expression products derived therefrom (i.e., including the exons thus identified or skipping same) can be stored in a database, which can be generated by a suitable computing platform.

[0480] Although the present methodology can be effected using prior art systems modified for such purposes, in order to process large amounts of sequence data, the present methodologies are preferably effected using a dedicated computational system.

[0481] Thus, according to another aspect of the present invention and as illustrated in FIGS. 5a-b, there is provided a system for generating a database of alternatively spliced sequences.

[0482] System 10 includes at least one central processing unit (CPU) 12, which executes a software application designed and configured for identifying alternatively spliced sequences. System 10 may also include a user input interface 14 [e.g., a keyboard and/or a cursor control device (e.g., a joy stick)] for inputting database or database related information, and a user output interface 16 (e.g., a monitor) for providing database information to a user 18.

[0483] System 10 may also include random access memory 24, ROM memory 26, a modem 28 and a graphic processing unit (GPU) 30.

[0484] System 10 preferably stores sequence information of the alternatively spliced sequences identified thereby on an internal and/or external storage device 20 such as a magnetic, optico-magnetic or optical disk as a database of alternatively spliced sequences. Such a database further includes information pertaining to database generation (e.g., source library), parameters used for selecting polynucleotide sequences, putative uses of the stored sequences, and various other annotations (as described below) and references which relate to the stored sequences and respective expression products.

[0485] The hardware elements of system 10 may be tied together by a common bus or several interlinked buses for transporting data between the various elements. Examples of system 10 include but are not limited to, a personal computer, a work station, a mainframe and the like.

[0486] System 10 of the present invention may be used by a user to query the stored database of sequences, to retrieve nucleotide sequences stored, therein or to generate polynucleotide sequences from user inputted sequences.

[0487] The methods of the present invention can be effected by any software application executable by system 10. The software application can be stored in random access memory 24, or internal and/or external data storage device 20 of system 10.

[0488] The database generated and stored by system 10 can be accessed by an on-site user of system 10, or by a remote user communicating with system 10, through for example, a terminal or thin client.

[0489] The latter configuration is best exemplified by the client-server system 50 which is shown in FIG. 5b. System 50 is configured to perform similar functions to those performed by system 10. In system 50, communication between a remote client 34 (e.g., computer, PDA, cell phone etc) and CPU unit 12 of a local server or computer is typically effected via a communication network 32. Communication network 32 can be any private or public communication network including, but not limited to, a standard or cellular telephony network, a computer network such as the Internet or intranet, a satellite network or any combination thereof.

[0490] As illustrated in FIG. 5b, communication network 32 can include one or more communication servers 22 (one shown in FIG. 5b) which serve for communicating data pertaining to the sequence of interest between remote client 18 processing unit 12. Thus, a request for data or processed data is communicated from remote client 18 to processing unit 12 through communication network 32 and processing unit 12 sends back a reply which includes data or processed data to remote client 18. Such a system configuration is advantageous since it enables users of system 50 to store and share gathered information and to collectively analyze gathered information.

[0491] Such a remote configuration can be implemented over a local area network (LAN) or a wide area network (WAN) using standard communication protocols.

[0492] It will be appreciated that existing computer networks such as the Internet can provide the infrastructure and technology necessary for supporting data communication between any number of users 18 and processors 12.

[0493] By applying the algorithms described hereinabove and in the Examples section, which follows, the present inventors collected sequence information which is presented in the files “transcripts.fasta” and “proteins.fasta” of enclosed CD-ROM1 and in the files “transcripts” and “proteins” of enclosed CD-ROM2. Annotations of these sequences are provided in the file “AnnotationForPatent.txt” of enclosed CD-ROM 1.

[0494] Novel polynucleotide sequences uncovered using the above-described methodology can be used in various clinical applications (e.g., therapeutic and diagnostic) as is further described hereinbelow.

[0495] A polynucleotide sequence of the present invention refers to a single or double stranded nucleic acid sequences which is isolated and provided in the form of an RNA sequence, a complementary polynucleotide sequence (cDNA), a genomic polynucleotide sequence and/or a composite polynucleotide sequences (e.g., a combination of the above).

[0496] As used herein the phrase “complementary polynucleotide sequence” refers to a sequence, which results form reverse transcription or messenger RNA using a reverse transcriptase or any other RNA dependent DNA polymerase. Such a sequence can be subsequently amplified in vivo or in vitro using a DNA dependent DNA polymerase.

[0497] As used herein the phrase “genomic polynucleotide sequence” refers to a sequence derived (isolated) from a chromosome and thus it represents a contiguous portion of a chromosome.

[0498] As used herein the phrase “composite polynucleotide sequence” refers to a sequence, which is composed of genomic and cDNA sequences. A composite sequence can include some exonal sequences required to encode the polypeptide of the present invention, as well as some intronic sequences interposing therebetween. The intronic sequences can be of any source, including of other genes, and typically will include conserved splicing signal sequences. Such intronic sequences may further include cis acting expression regulatory elements.

[0499] Thus, the present invention encompasses nucleic acid sequences described hereinabove; fragments thereof, sequences hybridizable therewith, sequences homologous thereto [e.g., at least 50%, at least 55%, at least 60%, at least 65%, at least 70%, at least 75%, at least 80%, at least 85%, at least 95% or more say 100% identical to the nucleic acid sequences set forth in the file “transcripts.fasta” of enclosed CD-ROM1 and in the file “transcripts” of enclosed CD-ROM2], sequences encoding similar polypeptides with different codon usage, altered sequences characterized by mutations, such as deletion, insertion or substitution of one or more nucleotides, either naturally occurring or man induced, either randomly or in a targeted fashion. The present invention also encompasses homologous nucleic acid sequences (i.e., which form a part of a polynucleotide sequence of the present invention) which include sequence regions unique to the polynucleotides of the present invention.

[0500] In cases where the polynucleotide sequences of the present invention encode previously unidentified polypeptides, the present invention also encompasses novel polypeptides or portions thereof, which are encoded by the isolated polynucleotide and respective nucleic acid fragments thereof described hereinabove.

[0501] Thus, the present invention also encompasses polypeptides encoded by the polynucleotide sequences of the present invention. The present invention also encompasses homologues of these polypeptides such homologues can be at least 50%, at least 55%, at least 60%, at least 65%, at least 70%, at least 75%, at least 80%, at least 85%, at least 95% or more say 100% homologous to the amino acid sequences set forth in the file “proteins.fasta” of enclosed CD-ROM1 and in the file “proteins” of enclosed CD-ROM2, as can be determined using BlastP software of the National Center of Biotechnology Information (NCBI) using default parameters. Finally, the present invention also encompasses fragments of the above described polypeptides and polypeptides having mutations, such as deletions, insertions or substitutions of one or more amino acids, either naturally occurring or man induced, either randomly or in a targeted fashion.

[0502] As mentioned hereinabove, biomolecular sequences uncovered using the methodology of the present invention can be efficiently utilized as tissue or pathological markers and as putative drugs or drug targets for treating or preventing a disease, according to their annotations (see Examples 6 and 7 of the Examples section).

[0503] For example, it is conceivable that the biomolecular sequences of the present invention may be functionally altered, by the addition or deletion of exons as described above.

[0504] As used herein the phrase “functionally altered biomolecular sequences” refers to expressed sequences, which protein products exhibit gain of function or loss of function or modification of the original function. Specific examples of functionally altered gene products identified using the teachings of the present invention are provided in Table 3, below.

[0505] As used herein the phrase “gain of function” when made in reference to a gene product (e.g., product of alternative splicing, product of RNA editing), indicates increased functionality as compared to the wild type gene product. Such a gain of function may have a dominant effect on the wild-type gene product. An alternatively spliced variant of Max, a binding partner of the Myc oncogene, provides a typical example for a “gain of function” alteration. This variant is truncated at the COOH-terminus and while is still capable of binding to the CACGTG motif of c-Myc, it lacks the nuclear localization signal and the putative regulatory domain of Max. When tested in a myc-ras cotransformation assay in rat embryo fibroblasts, wild-type Max suppressed cellular transformation, whereas the above-described Max splice variant enhanced transformation [Makela T P, Koskinen P J, Vastrik I, Alitalo K., Science. 1992 Apr. 17; 256(5055):373-7]. Thus, it is envisaged that a protein product, which exhibits a gain of function contributing to disease onset or progression be down regulated to thereby treat the disease. Alternatively, when such a gain of function promotes positive biological processes such as enhanced wound-healing, it is highly desirable to up-regulate expression or activity of the protein product in the subject in need thereof. Methods of up-regulating or down-regulating expression or activity of gene products are summarized hereinbelow.

[0506] As used herein the phrase “loss of function” when made in reference to any gene product (mRNA or protein), indicates total or partial reduction in function as compared to the wild type gene product. Loss of function can also manifest itself through a dominant negative effect.

[0507] As used herein the phrase “dominant negative” refers to the dominant negative effect of a gene product (e.g., product of alternative splicing, product of RNA editing) on the activity of wild type protein. For example, a protein product of an altered splice variant may bind a wild type target protein without enzymatically activating it (e.g., receptor dimers), thus blocking and preventing the active enzymes from binding and activating the target protein. This mode of action provides a mechanism to the dominant negative action of soluble receptors on wild-type membrane anchored receptors. Such soluble receptors may compete with wild-type receptors on ligand-binding and as such may be used as antagonists. For example, two splice variants of guanylyl cyclase-B receptor were recently described (GC-B1, Tamura N and Garbers D L, J. Biol. Chem. (2003) 278(49):48880-9). One form has a 25 amino acid deletion in the kinase homology domain. This variant binds the ligand but fails to activate the cyclase. A second variant includes only a portion of the extracellular domain. This form fails to bind the ligand. Both variants. When co-expressed with the wild-type receptor both act as dominant negative isoforms by virtue of blocking formation of active GC-B1 homodimers.

[0508] A dominant negative effect may also be exerted by miss-localization of the altered variant or by multiple modes of action. For example, the splice variants of wild-type mytogen activated protein kinase 5a, ERK5b and mERK5c act as dominant negative inhibitors based on inhibition of mERK5a kinase activity and mERK5a-mediated MEF2C transactivation. The C-terminal tail, which contains a putative nuclear localization signal, is not required for activation and kinase activity but is responsible for the activation of nuclear transcription factor MEF2C due to nuclear targeting. In addition, the N-terminal domain spanning amino acids (aa) 1-77 is important for cytoplasmic targeting; the domain from aa 78 to 139 is required for association with the upstream kinase MEK5; and the domain from an 140-406 is necessary for oligomerization [Yan et al. J Biol Chem. (2001) 276(14):10870-8]. In the case of protein products which exhibit dominant negative effect, it may be highly desirable to up-regulate their expression when necessary. For example, in a malignant stage which is controlled by over-expression of a specific receptor tyrosine kinase it may be desirable to upregulate expression or activity of a dominant negative form thereof to thereby treat the disease. For example, the soluble isoform of ErbB-2 and/or ErbB-3 which were uncovered as described herein (further described in Table 3, below) may be exogenously upregulated so as to treat epithelial cancers. Alternatively, when a dominant negative form of a naturally occurring negative regulator of a biochemical proliferative pathway is expressed in cancer, it may be highly desirable to down-regulate expression or activity of this altered form to thereby treat the disease. In such a case this dominant negative isoform also serves as a valuable diagnostic tool which may be also used for monitoring disease progression with or without treatment.

[0509] The phrase “modification of the original function” may be exemplified by a changing a receptor function to a ligand function. For example, a soluble secreted receptor may exhibit change in functionality as compared to a membrane-anchored wild-type receptor by acting as a ligand, activating parallel signaling pathways by trans-signaling [e.g., the signaling reported for soluble IL-6R, Kallen Biochim Biophys Acta. (2002) Nov. 11; 1592(3):323-43], stabilizing ligand-receptor interactions or protecting the ligand or the wild-type receptor from degradation and/or prolonging their half-life. In this case the soluble receptor will function as an agonist.

[0510] Thus, the biomolecular sequences of the present invention can be used as drugs or drug targets for treating a disease in a subject either by upregulating or downregulating expression thereof in the subject (i.e., a mammal, preferably a human subject).

[0511] As used herein the term “treating” refers to alleviating or diminishing a symptom associated with the disease or the condition. Preferably, treating cures, e.g., substantially eliminates, and/or substantially, decreases, the symptoms associated with the diseases or conditions of the present invention.

[0512] Antibodies, oligonucleotides, polynucleotides, polypeptides (collectively termed herein “agents”) and methods of utilizing same for upregulating or downregulating activity or expression of biomolecular sequences in a subject are summarized infra.

[0513] Upregulating

[0514] An agent capable of upregulating expression of a specific protein product may be an exogenous polynucleotide sequence designed and constructed to express at least a functional portion thereof (e.g., a catalytic domain, a protein-protein interaction domain, etc.). Accordingly, the exogenous polynucleotide sequence may be a DNA or RNA sequence encoding the protein.

[0515] The exogenous polynucleotide may be cloned from any a normal origin which is a suitable to provide the desired protein product or compatible homologs thereof. Methods of molecular cloning are described in the Example section which follows.

[0516] To express an exogenous protein in mammalian cells, a polynucleotide same is preferably ligated into a nucleic acid construct suitable for mammalian cell expression. Such a nucleic acid construct includes a promoter sequence for directing transcription of the polynucleotide sequence in the cell in a constitutive or inducible manner. Any suitable promoter sequence can be used by the nucleic acid construct of the present invention. Preferably, the promoter utilized by the nucleic acid construct of the present invention is active ink the specific cell population transformed. Examples of cell type-specific and/or tissue-specific promoters include promoters such as albumin that is liver specific [Pinkert et al., (1987) Genes Dev. 1:268-277], lymphoid specific promoters [Calame et al., (1988) Adv. Immunol. 43:235-275]; in particular promoters of T-cell receptors [Winoto et al., (1989) EMBO J. 8:729-733]0 and immunoglobulins; [Banerji et al. (1983) Cell 33729-740], neuron-specific promoters such as the neurofilament-promoter [Byrne et al. (1989) Proc. Natl. Acad. Sci. USA 86:5473-5477], pancreas-specific promoters [Edlunch et al. (1985) Science 230:912-916] or mammary gland-specific promoters such as the milk whey promoter (U.S. Pat. No. 4,873,316 and European Application Publication No. 264,166). The nucleic acid construct of the present invention can further include an enhancer, which can be adjacent or distant to the promoter sequence and can function in up regulating the transcription therefrom.

[0517] The nucleic acid construct of the present invention preferably further includes an appropriate selectable marker and/or an origin of replication. Preferably, the nucleic acid construct utilized is a shuttle vector, which can propagate both in E. coli (wherein the construct comprises an appropriate selectable marker and origin of replication) and be compatible for propagation in cells, or integration in a gene and a tissue of choice. The construct according to the present invention can be, for example, a plasmid, a bacmid, a phagemid, a cosmid, a phage, a virus or an artificial chromosome.

[0518] Examples of suitable constructs include, but are not limited to, pcDNA3, pcDNA3.1 (+/−), pGL3, PzeoSV2 (+/−), pDisplay, pEF/myc/cyto, pCMV/myc/cyto each of which is commercially available from Invitrogen Co. (www.invitrogen.com). Examples of retroviral vector and packaging systems are those sold by Clontech, San Diego, Calif., including Retro-X vectors pLNCX and pLXSN, which permit cloning into multiple cloning sites and the transgene is transcribed from CMV promoter. Vectors derived from Mo-MuLV are also included such as pBabe, where the transgene will be transcribed from the 5′LTR promoter.

[0519] It will be appreciated that the nucleic acid construct can be administered to the subject employing any suitable mode of administration, described hereinbelow (i.e., in-vivo gene therapy). Alternatively, the nucleic acid construct is introduced into a suitable cell via an appropriate gene delivery vehicle/method (transfection, transduction, homologous recombination, etc.) and an expression system as needed and then the modified cells are expanded in culture and returned to the individual (i.e., ex-vivo gene therapy).

[0520] Currently preferred in vivo nucleic acid transfer techniques include transfection with viral or non-viral constructs, such as adenovirus, lentivirus, Herpes simplex I virus, or adeno-associated virus (AAV) and lipid-based systems. Useful lipids for lipid-mediated transfer of the gene are, for example, DOTMA, DOPE, and DC-Chol [Tonkinson et al., Cancer Investigation, 14(1): 54-65 (1996)]. The most preferred constructs for use in gene therapy are viruses, most preferably adenoviruses, AAV, lentiviruses, or retroviruses. A viral construct such as a retroviral construct includes at least one transcriptional promoter/enhancer or locus-defining element(s), or other elements that control gene expression by other means such as alternate splicing, nuclear RNA export, or post-translational modification of messenger. Such vector constructs also include a packaging signal, long terminal repeats (LTRs) or portions thereof, and positive and negative strand primer binding sites appropriate to the virus used, unless it is already present in the viral construct. In addition, such a construct typically includes a signal sequence for secretion of the peptide from a host cell in which it is placed. Preferably the signal sequence for this purpose is a mammalian signal sequence or the signal sequence of the polypeptide variants of the present invention. Optionally, the construct may also include a signal that directs polyadenylation, as well as one or more restriction sites and a translation termination sequence. By way of example, such constructs will typically include a 5′ LTR, a tRNA binding site, a packaging signal, an origin of second-strand DNA synthesis, and a 3′ LTR or a portion thereof. Other vectors can be used that are non-viral, such as cationic lipids, polylysine, and dendrimers.

[0521] Agents for upregulating endogenous expression of specific splice variants of a given gene include antisense oligonucleotides, which are directed at splice sites of interest, thereby altering the splicing pattern of the gene. This approach has been successfully used for shifting the balance of expression of the two isoforms of Bcl-x [Taylor (1999) Nat. Biotechnol. 17:1097-1100; and Mercatante (2001) J. Biol. Chem. 276:16411-16417]; IL-5R [Karras (2000) Mol. Pharmacol. 58:380-387]; and c-myc [Giles (1999) Antisense Acid Drug Dev. 9:213-220].

[0522] For example, interleukin 5 and its receptor play a critical role as regulators of hematopoiesis and as mediators in some inflammatory diseases such as allergy and asthma. Two alternatively spliced isoforms are generated from the IL-5R gene, which include (i.e., long form) or exclude (i.e., short form) exon 9. The long form encodes an intact membrane-bound receptor, while the shorter form encodes a secreted soluble non-functional receptor. Using 2′-O-MOE-oligonucleotides specific to regions of exon 9, Karras and co-workers (supra) were able to significantly decrease the expression of the wild type receptor and increase the expression of the shorter isoforms. Approaches which can be used to design and synthesize oligonucleotides according to the teachings of the present invention are described hereinbelow and by Sazani and Kole (2003) Progress in Molecular and Subcellular Biology 31:217-239.

[0523] Alternatively or additionally, upregulation may be effected by administering to the subject the polypeptide product per se or an active portion thereof, as described hereinabove. However, since the bioavailability of large polypeptides is relatively small due to high degradation rate and low penetration rate, administration of polypeptides is preferably confined to small peptide fragments (e.g., about 100 amino acids).

[0524] Polypeptide products can be biochemically synthesized such as by employing standard solid phase techniques. Such methods include exclusive solid phase synthesis, partial solid phase synthesis methods, fragment condensation classical solution synthesis. These methods are preferably used when the peptide is relatively short (i.e., 10 kDa) and/or when it cannot be produced by recombinant techniques (i.e., not encoded by a nucleic acid sequence) and therefore involves different chemistry.

[0525] Solid phase polypeptide synthesis procedures are well known in the and further described by John Morrow Stewart and Janis Dillaha Young, Solid Phase Peptide Syntheses (2nd Ed.; Pierce Chemical Company, 1984).

[0526] Synthetic polypeptides can be purified by preparative high performance liquid chromatography [Creighton T. (1983) Proteins, structures and molecular principles. WH Freeman and Co. N.Y.]; and the composition of which can be confirmed via amino acid sequencing.

[0527] In cases where large amounts of a polypeptide are desired, it can be generated using recombinant techniques such as described by Bitter et al., (1987) Methods in Enzymol. 153:516-544, Studier et al. (1990) Methods in Enzymol. 185:60-89, Brisson et al. (1984) Nature 310:511-514 Takamatsu et al. (1987) EMBO J. 6:307-311, Coruzzi et al. (1984) EMBO J. 3:1671-1680 and Brogli et al., (1984) Science 224:838-843, Gurley et al. (1986) Mol. Cell. Biol. 6:559-565 and Weissbach & Weissbach, 1988, Methods for Plant; Molecular Biology, Academic Press, NY, Section VIII, pp 421-463.

[0528] An agent capable of upregulating a biomolecular sequence of interest may also be any compound which is capable of increasing the transcription and/or translation of an endogenous DNA or mRNA encoding the desired protein product.

[0529] Downregulating

[0530] One example of an agent capable of downregulating the activity of a protein product is an antibody or antibody fragment capable of specifically binding to the specific protein product of the present invention and neutralizing its activity. Preferably, the antibody specifically binds at least one epitope of the protein product. As used herein, the term “epitope” refers to any antigenic determinant on an antigen to which the paratope of an antibody binds. For example, an antibody capable of specifically binding a truncated form of Follicular Stimulating Hormone Receptor (FSHR, SEQ ID NO: 46) may be used to downregulate this putative dysfunctional isoform of FSHR to thereby treat infertility problems associated therewith. Such an antibody is preferably directed at a bridging polypeptide (SEQ ID NO: 223) of SEQ ID NO: 46, to allow distinction of this isoform from the wild-type FSHR polypeptide.

[0531] Epitopic determinants usually consist of chemically active surface groupings of molecules such as amino acids or carbohydrate side chains and usually have specific three dimensional structural characteristics, as well as specific charge characteristics.

[0532] The term “antibody” as used in this invention includes intact molecules as well as functional fragments thereof, such as Fab, F(ab′)2, and Fv that are capable of binding to macrophages. These functional antibody fragments are defined as follows: (1) Fab, the fragment which contains a monovalent antigen-binding fragment of an antibody molecule, can be produced by digestion of whole antibody with the enzyme Papain to yield an intact light chain and a portion of one heavy chain; (2) Fab′, the fragment of an antibody molecule that can be obtained by treating whole antibody with pepsin, followed by reduction, to yield an intact light chain and a portion of the heavy chain; two Fab′ fragments are obtained per antibody molecule; (3) (Fab′)2, the fragment of the antibody that can be obtained by treating whole antibody with the enzyme pepsin without subsequent reduction; F(ab′)2 is a dimer of two Fab′ fragments held together by two disulfide bonds; (4) Fv, defined as a genetically engineered fragment containing the variable region of the light chain and, the variable region of the heavy chain expressed as two chains; and (5) Single chain antibody (“SCA”), a genetically engineered molecule containing the variable region of the light chain and the variable region of the heavy chain, linked by a suitable polypeptide linker as a genetically fused single chain molecule.

[0533] Methods of producing polyclonal and monoclonal antibodies as well as fragments thereof are well known in the art (See for example, Harlow and Lane, Antibodies: A Laboratory Manual, Cold Spring Harbor Laboratory, New York, 1988, incorporated herein by reference).

[0534] Antibody fragments according to the present invention can be prepared by proteolytic hydrolysis of the antibody or by expression in E. coli or mammalian cells (e.g. Chinese hamster ovary cell culture or other protein expression systems) of DNA encoding the fragment. Antibody fragments can obtained by pepsin or papain digestion of whole antibodies by conventional methods. For example, antibody fragments can be produced by enzymatic cleavage of antibodies with pepsin to provide a 5S fragment denoted F(ab′)2. This fragment can be further cleaved using a thiol reducing agent, and optionally a blocking group for the sulfhydryl groups resulting from cleavage of disulfide linkages, to produce 3.5S Fab′ monovalent fragments. Alternatively, an enzymatic cleavage using pepsin produces two monovalent Fab′ fragments and an Fc fragment directly. These methods are described, for example, by Goldenberg, U.S. Pat. Nos. 4,036,945 and 4,331,647, and references contained therein, Which patents are hereby incorporated by reference in their entirety. See also Porter, R. R. [Biochem. J. 73: 119-126 (1959)]. Other methods of cleaving antibodies, such as separation of heavy chains to form monovalent light-heavy chain fragments, further cleavage of fragments, or other enzymatic, chemical, or genetic techniques may also be used, so long as the fragments bind to the antigen that is recognized by the intact antibody.

[0535] Fv fragments comprise an association of VH and VL chains. This association may be noncovalent, as described in Inbar et al. [Proc. Nat'l Acad. Sci; USA 69:2659-62 (19720]. Alternatively, the variable chains can be linked by an intermolecular disulfide bond or cross-linked by chemicals such as glutaraldehyde. Preferably, the Fv fragments comprise VH and VL chains connected by a peptide, linker. These single-chain antigen binding proteins (sFv) are, prepared by constructing a structural gene comprising DNA sequences encoding the VH and VL domains connected by an oligonucleotide. The structural gene is inserted into an expression vector, which is subsequently introduced into a host cell such as E. coli. The recombinant host cells synthesize a single polypeptide chain with a linker peptide bridging the two V domains. Methods for producing sFvs are described, for example, by [Whitlow and Filpula, Methods 2: 97-105 (1991); Bird et al., Science 242:423-426 (1988); Pack et al., Bio/Technology 11:1271-77 (1993); and U.S. Pat. No. 4,946,778, which is hereby incorporated by reference in its entirety.

[0536] Another form of an antibody fragment is a peptide coding for a single complementarity-determining region (CDR). CDR peptides (“minimal recognition units”) can be obtained by constructing genes encoding the CDR of an antibody of interest. Such genes are prepared, for example, by using the polymerase chain reaction to synthesize the variable region from RNA of antibody-producing cells. See, for example, Larrick and Fry [Methods, 2: 106-10 (1991)].

[0537] Humanized forms of non-human (e.g., murine) antibodies are chimeric molecules of immunoglobulins, immunoglobulin chains or fragments thereof (such as Fv, Fab, Fab′, F(ab′).sub.2 or other antigen-binding subsequences of antibodies) which contain minimal sequence derived form non-human immunoglobulin. Humanized antibodies include human immunoglobulins (recipient antibody) in which residues form a complementary determining region (CDR) of the recipient are replaced by residues from a CDR of a non-human species (donor antibody) such as mouse, rat or rabbit having the desired specificity, affinity and capacity. In some instances, Fv framework residues of the human immunoglobulin are replaced by corresponding non-human residues. Humanized antibodies may also comprise residues which are found neither in the recipient antibody nor in the imported CDR or framework sequences. In general, the humanized antibody will comprise substantially all of at least one, and typically two, variable domains, in which all or substantially all of the CDR regions correspond to those of a non-human immunoglobulin and all or substantially all of the FR regions are those of a human immunoglobulin consensus sequence. The humanized antibody optimally also will comprise at least a portion of an immunoglobulin constant region (Fc), typically that of a human immunoglobulin [Jones et al., Nature, 321:522-525 (1986); Riechmann et al., Nature, 332:323-329′(1988); and Presta, Curr. Op. Struct. Biol., 2:593-596 (1992)].

[0538] Methods for humanizing non-human antibodies are well known in the art. Generally, a humanized antibody has one or more amino acid residues introduced into it from a source which is non-human. These non-human amino acid residues are often referred to as import residues, which are typically taken from an import variable domain. Humanization can be essentially performed following the method of Winter and co-workers [Jones et al., Nature, 321:522-525 (1986); Riechmann et al., Nature 332:323-327 (1988); Verhoeyen et al., Science, 239:1534-1536 (1988)], by substituting rodent CDRs or CDR sequences for the corresponding sequences of a human antibody. Accordingly, such humanized antibodies are chimeric antibodies (U.S. Pat. No. 4,816,567) wherein substantially less than an intact human variable domain has been substituted by the corresponding sequence from a non-human species. In practice, humanized antibodies are typically human antibodies in which some CDR residues and possibly some FR residues are substituted by residues from analogous sites in rodent antibodies.

[0539] Human antibodies can also be produced using various techniques known in the art, including phage display libraries [Hoogenboom and Winter, J. Mol. Biol., 227:381 (1991); Marks et al., J. Mol. Biol., 222:581 (1991)]. The techniques of Cole et al. and Boerner et al. are also available for the preparation of human monoclonal antibodies (Cole et al., Monoclonal Antibodies and Cancer Therapy, Alan R. Liss, p. 77 (1985) and Boerner et al., J. Immunol., 147(1):86-95 (1991)]. Similarly, human antibodies can be made by introduction of human immunoglobulin loci into transgenic animals, e.g., mice in which the endogenous immunoglobulin genes have been partially or completely inactivated upon challenge, human antibody production is observed, which closely resembles that seen in humans in all respects, including gene rearrangement, assembly, and antibody repertoire. This approach is described, for example, in U.S. Pat. Nos. 5,545,807; 5,545,806; 5,569,825; 5,625,126; 5,633,425; 5,661,016, and in the following scientific publications: Marks et al., Bio/Technology 10: 779-783 (1992); Lonberg et al., Nature 368: 856-859 (1994); Morrison, Nature 368 812-13 (1994); Fishwild et al., Nature Biotechnology 14, 845-51 (1996); Neuberger, Nature Biotechnology 14: 826 (1996); and Lonberg and Huszar, Intern. Rev. Immunol. 13, 65-93 (1995).

[0540] Another agent capable of downregulating a biomolecular sequence of the present invention is a small interfering RNA (siRNA) molecule. RNA interference is a two-step process. The first step, which is termed as the initiation step, input dsRNA is digested into 21-23 nucleotide (nt) small interfering RNAs (siRNA), probably by the action of Dicer, a member of the RNase III family of dsRNA-specific ribonucleases, which processes (cleaves) dsRNA (introduced directly or via a transgene or a virus) in an ATP-dependent manner. Successive cleavage events degrade the RNA to 119-21 bp duplexes (siRNA), each with 2-nucleotide 3′ overhangs [Hutvagner and Zamore Curr. Opin. Genetics and Development 12:225-232 (2002); and Bernstein Nature 409:363-366 (200.1)].

[0541] In the effector step, the siRNA duplexes bind to a nuclease complex to form the RNA-induced silencing complex (RISC). An ATP-dependent unwinding of the siRNA duplex is re for activation of the RISC. The active RISC then targets the homologous transcript by base pairing interactions and cleaves the mRNA into 12 nucleotide fragments from the 3′ terminus of the siRNA [Hutvagner and Zamore Curr. Opin. Genetics and Development 12:225-232 (2002); Hammond et al. (2001)]. Nat. Rev. Gen. 2:110-119 (2001); and Sharp Genes. Dev. 15:485-90 (2001)]. Although the mechanism of cleavage is still to be elucidated, research indicates that each RISC contains a single siRNA and an RNase [Hutvagner and Zamore Curr. Opin. Genetics and Development 12:225-232 (2002)].

[0542] Because of the remarkable potency of RNAi, an amplification step within the RNAi pathway has been suggested. Amplification could occur by copying of the input dsRNAs which would generate more siRNAs, or by replication of the siRNAs formed. Alternatively or additionally, amplification could be effected by multiple turnover events of the RISC [Hammond et al. Nat. Rev. Gen. 2: 110-119 (2001), Sharp Genes. Dev. 15:485-90 (2001); Hutvagner and Zamore Curr. Opin. Genetics and Development 12:225-232 (2002)]. For more information on RNAi see the following reviews Tuschl Chem Biochem. 2:239-245 (2001); Cullen Nat. Immunol. 3:597-599 (2002); and Brantl Biochem. Biophys. Act. 1575:15-25 (2002).

[0543] Synthesis of RNAi molecules suitable for use with the present invention can be effected as follows. First, the mRNA sequence is scanned downstream of the AUG start codon for AA dinucleotide sequences. Occurrence of each AA and the 3′ adjacent 19 nucleotides is recorded as potential siRNA target sites. Preferably, siRNA target sites are selected from the open reading frame, as untranslated regions (UTRs) are richer in regulatory protein binding sites. UTR-binding proteins and/or translation initiation complexes may interfere with binding of the siRNA endonuclease complex [Tuschl ChemBiochem. 2:239-245]. It will be appreciated though, that siRNAs directed at untranslated regions may also be effective, as demonstrated for GAPDH wherein siRNA directed at the 5′UTR mediated about 90% decrease in cellular GAPDH mRNA and completely abolished protein level (www.ambion.com/techlib/tn/91/912.html).

[0544] Second, potential target sites are compared to an appropriate genomic database (e.g., human, mouse, rat etc.) using any sequence alignment software such as the BLAST software available from the NCBI server (www.ncbi.nlm.nih.gov/BLAST/). Putative target sites which exhibit significant homology to other coding sequences are filtered out.

[0545] Qualifying target sequences are selected as template for siRNA synthesis. Preferred sequences are those including low G/C content as these have proven to be more effective in mediating gene silencing as compared to those with G/C content higher than 55%. Several target sites are preferably selected along the length of the target gene for evaluation. For better evaluation of the selected siRNAs, a negative control is preferably used in conjunction. Negative control siRNA preferably include the same nucleotide composition as the siRNAs but lack significant homology to the genome. Thus, a scrambled nucleotide sequence of the siRNA is preferably used, provided it does not display any significant homology to any other gene.

[0546] Another agent capable of downregulating a biomolecular sequence of the present invention is a DNAzyme molecule capable of specifically cleaving an mRNA transcript or DNA sequence of the biomolecular sequence. DNAzymes are single-stranded polynucleotides which are capable of cleaving both single and double stranded target sequences (Breaker, R. R. and Joyce, G. Chemistry and Biology 1995; 2:655; Santoro, S. W. & Joyce, G. F. Proc. Natl, Acad. Sci. USA 1997; 943:4262) A general model (the “10-23” model) for the DNAzyme has been proposed. “10-23” DNAzymes have a catalytic domain of 15 deoxyribonucleotides, flanked by two substrate-recognition domains of seven to nine deoxyribonucleotides each. This type of DNAzyme can effectively cleave its substrate RNA at purine:pyrimidine junctions (Santoro, S. W. & Joyce, G. F. Proc. Natl, Acad. Sci. USA 199; for rev of DNAzymes see Khachigian, L M [Curr Opin Mol Ther 4:119-21 (2002)].

[0547] Examples of construction and amplification of synthetic, engineered DNAzymes recognizing single and double-stranded target cleavage sites have been disclosed in U.S. Pat. No. 6,326,174 to Joyce et al. DNAzymes of similar design directed against the human Urokinase receptor were recently observed to inhibit Urokinase receptor expression, and successfully inhibit colon cancer cell metastasis in vivo (Itoh et al, 20002, Abstract 409, Ann Meeting Am Soc Gen Ther www.asgt.org). In another application, DNAzymes complementary to bcr-ab1 oncogenes were successful in inhibiting the oncogenes expression in leukemia cells, and lessening relapse rates in autologous bone marrow transplant in cases of CML and ALL.

[0548] Downregulation of a biomolecular sequence can also be effected by using an antisense oligonucleotide capable of specifically hybridizing with an mRNA transcript of interest.

[0549] Design of antisense molecules must be effected while considering two aspects important to the antisense approach. The first aspect is delivery of the oligonucleotide into the cytoplasm of the appropriate cells, while the second aspect is design of an oligonucleotide which specifically binds the designated mRNA within cells in a way which inhibits translation thereof.

[0550] The prior art teaches of a number of delivery strategies which can be used to efficiently deliver oligonucleotides into a wide variety of cell types [see, for example, Luft J Mol Med 76: 75-6 (1998); Kronenwett et al. Blood 91: 852-62 (1998); Rajur et al. Bioconjug Chem 8: 935-40 (1997); Lavigne et al. Biochem Biophys Res Commun 237: 566-71 (1997) and Aoki et al. (1997) Biochem Biophys Res Commun 231: 540-5 (1997)].

[0551] In addition, algorithms for identifying those sequences with the highest predicted binding affinity for their target mRNA based on a thermodynamic cycle that accounts for the energetics of structural alterations in both the target mRNA and the oligonucleotide are also available [see, for example, Walton et al. Biotechnol Bioeng 65: 1-9 (1999)].

[0552] Such algorithms have been successfully used to implement an antisense approach in cells. For example, the algorithm developed by Walton et al. enabled scientists to successfully design antisense oligonucleotides for rabbit beta-globin (RBG) and mouse tumor necrosis factor-alpha (TNF alpha) transcripts. The same research group has more recently reported that the antisense activity of rationally selected oligonucleotides against three model a target mRNAs (human lactate dehydrogenase A and B and rat gp130) in cell culture as evaluated by a kinetic PCR technique proved effective in almost all cases, including tests against three-different targets in two cell types with phosphodiester and phosphorothioate oligonucleotide chemistries.

[0553] In addition, several approaches for designing and predicting efficiency of specific oligonucleotides using an in vitro system were also published (Matveeva et al., Nature Biotechnology 16:1374-1375 (1998)].

[0554] Several clinical trials have demonstrated safety, feasibility and activity of antisense oligonucleotides. For example, antisense oligonucleotides suitable for the treatment of cancer have been successfully used [Holmund et al., Curr Opin Mol Ther 1:372-85 (1999)], while treatment of hematological malignancies via antisense oligonucleotides targeting c-myb gene, p53 and Bcl-2 had entered clinical trials and had been shown to be tolerated by patient [Geri Curr Opin Mol Ther 1:297-306 (1999)].

[0555] More recently, antisense-mediated suppression of human heparanase gene expression has been reported to inhibit pleural dissemination of human cancer cells in a mouse mode [Uno et al., Cancer Res 61:7855-60 (2001)].

[0556] Thus, the current consensus is that recent developments in the field of antisense technology which, as described above, have led to the generation of highly accurate antisense design algorithms and a wide variety of oligonucleotide delivery systems, enable an ordinarily skilled artisan to design and implement antisense approaches suitable for downregulating expression of known sequences without having to resort to undue trial and error experimentation.

[0557] Another agent capable of downregulating a biomolecular sequence of interest is a ribozyme molecule capable of specifically cleaving an mRNA transcript encoding a specific protein product. Ribozymes are being increasingly used for the sequence-specific inhibition of gene expression by the cleavage of mRNAs encoding proteins of interest [Welch et al., Curr Opin Biotechnol. 9:486-96 (1998)]. The possibility of designing ribozymes to cleave any specific target RNA has rendered them valuable tools in both basic research and therapeutic applications. In the therapeutics area, ribozymes have been exploited to target viral RNAs in infectious diseases, dominant oncogenes in cancers and specific somatic mutations in genetic disorders [Welch et al., Clin Diagn Virol. 10:163-71 (1998)]. Most notably, several ribozyme gene therapy protocols for HIV patients are already in Phase 1 trials. More recently, ribozymes have been used for transgenic animal research, gene target validation and pathway elucidation. Several ribozymes are in various stages of clinical trials. ANGIOZYME was the first chemically synthesized ribozyme to be studied in human clinical trials. ANGIOZYME specifically inhibits formation of the VEGF-r (Vascular Endothelial Growth Factor receptor), a key component in the angiogenesis pathway. Ribozyme Pharmaceuticals, Inc., as well as other firms have demonstrated the importance of anti-angiogenesis therapeutics in animal models. HEPTAZYME, a ribozyme designed to selectively destroy Hepatitis C Virus (HCV) RNA, was found effective in decreasing Hepatitis C viral RNA in cell culture assays (Ribozyme Pharmaceuticals, Incorporated—WEB home page).

[0558] An additional method of regulating the expression of a biomolecular sequence in cells is via triplex forming oligonuclotides (TFOs). Recent studies have shown that TFOs can be designed which can recognize and bind to polypurine/polypirimidine regions in double-stranded helical DNA in a sequence-specific manner. These recognition rules are outlined by Maher III, L. J., et al., Science, 1989; 245:725-730; Moser, H. E., et al., Science, 1987; 238:645-630; Beal, P. A., et al, Science, 1992; 251:1360-1363; Cooney, M., et al., Science, 1988; 241:456-459; and Hogan, M. E., et al., EP Publication 3754008. Modification of the oligonuclotides, such as the introduction of intercalators and backbone substitutions, and optimization of binding conditions (pH and cation concentration) have aided in overcoming, inherent obstacles to TFO activity such as charge repulsion and instability, and it was recently shown that synthetic oligonucleotides can be targeted to specific sequences (for a recent review see Seidman and Glazer, J Clin Invest 2003; 112:487-94).

[0559] In general, the triplex-forming oligonucleotide has the sequence correspondence:

| | | | | |
|---|---|---|---|---|
| oligo | 3'--A | G | G | T |
| duplex | 5'--A | G | C | T |
| duplex | 3'--T | C | G | A |

[0560] However, it has been shown that the A-AT and G-GC triplets have the greatest triple helical stability (Reither and Jeltsch, B M C Biochem, 2002, Sep. 12, Epub). The same authors have demonstrated that TFOs de signed according to the A-AT and G-GC rule do not form non-specific triplexes, indicating that the triplex formation is indeed sequence specific.

[0561] Triplex-forming oligonucleotides preferably are at least about 15, more preferably about 25, still more preferably about 30 or more nucleotides in length, up to about 50 or about 100 bp.

[0562] Transfection of cells (for example, via cationic liposomes) with TFOs, and formation of the triple helical structure with the target DNA induces steric and functional changes, blocking transcription initiation and elongation, allowing the introduction of desired sequence changes in the endogenous DNA and resulting in the specific downregulation of gene expression. Examples of such suppression of gene expression in cells treated with TFOs include knockout of episomal supFG1 and endogenous HPRT genes in mammalian cells (Vasquez et al., Nucl Acids Res. 1999; 27:1176-81, and Puri, et al, J Biol Chem, 2001; 276:28991-98), and the sequence- and target specific downregulation of expression of the Ets2 transcription factor, important in prostate cancer etiology (Carbone, et al, Nucl Acid Res. 2003; 31:833-43), and the pro-inflammatory ICAM-1 gene (Besch et al, J Biol Chem, 2002; 277:32473-79). In addition, Vuyisich and Beal have recently shown that sequence specific TFOs can bind to dsRNA, inhibiting activity of dsRNA-dependent enzymes such as RNA-dependent kinases (Vuyisich and Beal, Nuc. Acids Res 2000; 28:2369-74).

[0563] Additionally, TFOs designed according to the abovementioned principles can induce directed mutagenesis capable of effecting DNA repair, thus providing both downregulation and upregulation of expression of endogenous genes (Seidman and Glazer, J Clin Invest 2003; 112:487-94). Detailed description of the design synthesis and administration of effective TFOs can be found in U.S. Patent Application Nos. 2003 017068 and 2003 0096980 to Froehler et al, and 2002 0128218 and 2002 0123476 to Emanuele et al, and U.S. Pat. No. 5,721,138 to Lawn.

[0564] Oligonucleotides designed for carrying out the methods of the present invention for any of the sequences provided herein (designed as described above) can be generated according to any oligonucleotide synthesis method known in the art such as enzymatic synthesis or solid phase synthesis. Equipment and reagents for executing solid-phase synthesis are commercially available from, for example, Applied Biosystems. Any other means for such synthesis may also be employed; the actual synthesis of the oligonucleotides is well within the capabilities of one skilled in the art.

[0565] Oligonucleotides used according to this aspect of the present invention are those having a length selected from a range of about 10 to about 200 bases preferably about 15 to about 150 bases, more preferably about 20 to about 100 bases, most preferably about 20 to about 50 bases.

[0566] The oligonucleotides of the present invention may comprise heterocylic nucleosides consisting of purines and the pyrimidines bases, bonded in a 3′ to 5′ phosphodiester linkage.

[0567] Preferably used oligonucleotides are those modified in either backbone, internucleoside linkages or bases, as is broadly described hereinunder. Such modifications can oftentimes facilitate oligonucleotide uptake and resistivity to intracellular conditions.

[0568] Specific examples of preferred oligonucleotides useful according to this aspect of the present invention include oligonucleotides containing modified backbones or non-natural internucleoside linkages. Oligonucleotides having modified backbones include those that retain a phosphorus atom in the backbone, as disclosed in U.S. Pat. Nos. ,687,808; 4,469,863; 4,476,301; 5,023,243; 5,177,196; 5,188,897; 5,264,423; 5,276,019; 5,278,302; 5,286,717; 5,321,131; 5,399,676; 5,405,939; 5,453,496; 5,455,233; 5,466,677; 5,476,925; 5,519,126; 5,536,821; 5,541,306; 5,550,111; 5,563,253; 5,571,799; 5,587,361; and 5,625,050.

[0569] Preferred modified oligonucleotide backbones include, for example, phosphorothioates, chiral phosphorothioates, phosphorodithioates, phosphotriesters, aminoalkyl phosphotriesters, methyl and other alkyl phosphonates including 3′-alkylene phosphonates and chiral phosphonates, phosphinates, phosphoramidates including 3′-amino phosphoramidate and aminoalkylphosphoramidates, thionophosphoramidates, thionoalkylphosphonates, thionoalkylphosphotriesters, and boranophosphates having normal 3′-5′ linkages, 2′-5′ linked analogs of these, and those having inverted polarity wherein the adjacent pairs of nucleoside units are linked 3′-5′ to 5′-3′ or 2′-5′ to 5′-2′. Various salts, mixed salts and free acid forms can also be used.

[0570] Alternatively, modified oligonucleotide backbones that do not include a phosphorus atom therein have backbones that are formed by short chain alkyl or cycloalkyl internucleoside linkages, mixed heteroatom and alkyl or cycloalkyl internucleoside linkages, or one or more short chain heteroatomic or heterocyclic internucleoside linkages. These include those having morpholino linkages (formed in part from the sugar portion of a nucleoside); siloxane backbones; sulfide, sulfoxide and sulfone backbones; formacetyl and thioformacetyl backbones; methylene formacetyl and thioformacetyl backbones; alkene containing backbones; sulfamate backbones; methyleneimino and methylenehydrazino backbones; sulfonate and sulfonamide backbones; amide backbones; and others having mixed N, O, S and CH₂ component parts, as disclosed in U.S. Pat. Nos. 5,034,506; 5,166,315; 5,185,444; 5,214,134; 5,216,141; 5,235,033; 5,264,562; 5,264,564; 5,405,938; 5,434,257; 5,466,677; 5,470,967; 5,489,677; 5,541,307; 5,561,225; 5,596,086; 5,602,240; 5,610,289; 5,602,240; 5,608,046; 5,610,289; 5,618,704; 5,623,070; 5,663,312; 5,633,360; 5,677,437; and 5,677,439.

[0571] Other oligonucleotides which can be used according to the present invention, are those modified in both sugar and the internucleoside linkage, i.e., the backbone, of the nucleotide units are replaced with novel groups. The base units are maintained for complementation with the appropriate polynucleotide target. An example for such an oligonucleotide mimetic, includes peptide nucleic acid (PNA). A PNA oligonucleotide refers to an oligonucleotide where the sugar-backbone is replaced with an amide containing backbone, in particular an aminoethylglycine backbone. The bases are retained and are bound directly or indirectly to aza nitrogen atoms of the amide portion of the backbone. United States patents that teach the preparation of PNA compounds include, but are not limited to, U.S. Pat. Nos. 5,539,082; 5,714,331; and 5,719,262, each of which is herein incorporated by reference. Other backbone modifications, which can be used in the present invention are disclosed in U.S. Pat. No. 6,303,374.

[0572] Oligonucleotides of the present invention may also include base modifications or substitutions. As used herein, “unmodified” or “natural” bases include the purine bases adenine (A) and guanine (G), and the pyrimidine bases thymine (T), cytosine (C) and uracil (U). Modified bases include but are not limited to other synthetic and natural bases such as 5-methylcytosine (5-me-C), 5-hydroxymethyl cytosine, xanthine, hypoxanthine, 2-aminoadenine, 6-methyl and other alkyl derivatives of adenine and guanine, 2-propyl and other alkyl derivatives of adenine and guanine, 2-thiouracil, 2-thiothymine and 2-thiocytosine, 5-halouracil and cytosine, 5-propynyl uracil and cytosine, 6-azo uracil, cytosine and thymine, 5-uracil (pseudouracil), 4-thiouracil, 8-halo, 8-amino, 8-thiol, 8-thioalkyl, 8-hydroxyl and other 8-substituted adenines and guanine, 5-halo particularly 5-bromo, 5-trifluoromethyl and other 5-substituted uracils and cytosines, 7-methyl guanine and 7-methyladenine, 8-azaguanine and 8-azaadenine, 7-deazaguanine and 7-deazaadenine and 3-deazaguanine and 3-deazaadenine. Further bases include those disclosed in U.S. Pat. No. 3,687,808, those disclose in The Concise Encyclopedia Of Polymer Science and Engineering, pages 858-859, Kroschwitz, J. I., ed. John Wiley & Sons, 1990, those disclosed by Englisch et al., Angewandtet Chemie, International Edition, 1991, 30, 613, and those disclosed by Sanghvi, Y. S., Chapter 15, Antisense Research and Applications, pages. 289-302, Crooke, S. T. and Lebleu, B., ed., CRC Press, 1993. Such base snare particularly useful for increasing the binding affinity of the oligomeric compounds of the invention. These include 5-substituted pyrimidines, 6-azapyrimidines and N-2, N-6 and O-6 substituted purines, including 2-aminopropyladenine, 5-propynyluracil and 35-propynylcytosine. 5-methylcytosine substitutions have been shown to increase nucleic acid duplex stability by 0.6-1.2° C. [Sanghvi Y S et al. (1993) Antisense Research and Applications, CRC Press, Boca Raton 276-278] and are presently preferred base substitutions, even more particularly when combined with 2′-O-methoxyethyl sugar modifications.

[0573] Another modification of the oligonucleotides of the invention involves chemically linking to the oligonucleotide one or more moieties or conjugates, which enhance the activity, cellular distribution or cellular uptake of the oligonucleotide. Such moieties include but are riot limited to lipid moieties such as a cholesterol moiety, cholic acid, thioether, e.g., hexyl-S-tritylthiol, a thiocholesterol, an aliphatic chain, e.g., dodecandiol or undecyl residues, a phospholipid, e.g., di-hexadecyl-rac-glycerol or triethylammonium 1,2-di-O-hexadecyl-rac-glycero-3-H-phosphonate, a polyamine or a polyethylene, glycol chain, or adamantane acetic acid, a palmityl moiety, or an octadecylamine or hexylamino-carbonyl-oxycholesterol moiety, as disclosed in U.S. Pat. No. 6,303,374.

[0574] It is not necessary for all positions in a given oligonucleotide molecule to be uniformly modified, and in fact more than one of the aforementioned modifications may be incorporated in a single compound or even at a single nucleoside within an oligonucleotide.

[0575] The above-described agents can be provided to the subject per se, or as part of a pharmaceutical composition where they are mixed with a pharmaceutically acceptable carrier.

[0576] As used herein a “pharmaceutical composition” refers to a preparation of one or more of the active ingredients described herein with other chemical components such as physiologically suitable carriers and excipients. The purpose of a pharmaceutical composition is to facilitate administration of a compound to an organism.

[0577] Herein the term “active ingredient” refers to the preparation accountable for the biological effect.

[0578] Hereinafter, the phrases “physiologically acceptable carrier” and “pharmaceutically acceptable carrier” which may be interchangeably used refer to a carrier or a diluent that does not cause significant irritation to an organism and does not abrogate the biological activity and properties of the administered compound. An adjuvant is included under these phrases. One of the ingredients included in the pharmaceutically acceptable carrier can be for example polyethyleneglycol (PEG), a biocompatible polymer with a wide range of solubility in both organic and aqueous media (Mutter et al. (1979).

[0579] Herein the term “excipient” refers to an inert substance added to a pharmaceutical composition to further facilitate administration of an active ingredient. Examples, without limitation of excipients include calcium carbonate, calcium phosphate, various sugars and types of starch, cellulose derivatives, gelatin, vegetable oils and polyethylene glycols.

[0580] Techniques for formulation and administration of drugs may be found in “Remington's Pharmaceutical Sciences,” Mack Publishing Co., Easton, Pa., latest edition, which is incorporated herein by reference.

[0581] Suitable routes of administration may, for example, include oral, rectal, transmucosal, especially transnasal, intestinal or parenteral delivery, including intramuscular, subcutaneous and intramedullary injections as well as intrathecal direct intraventricular, intravenous, intraperitoneal, intranasal, or intraocular injections. Alternately, one may administer a preparation in a local rather than systemic manner, for example, via injection of the preparation directly into a specific region of a patient's body.

[0582] Pharmaceutical compositions of the present invention may be manufactured by processes well known in the art, e.g., by means of conventional mixing, dissolving, granulating, dragee-making, levigating, emulsifying, encapsulating, entrapping or lyophilizing processes.

[0583] Pharmaceutical compositions for use in accordance with the present invention may be formulated in conventional manner using one or more physiologically acceptable carriers comprising excipients and auxiliaries, which facilitate processing of the active ingredients into preparations which, can be used pharmaceutically. Proper formulation is upon the route of administration chosen.

[0584] For injection, the active ingredient of the invention may be formulated in aqueous solutions, preferably in physiologically compatible buffers such as Hank's solution, Ringer's solution, or physiological salt buffer. For transmucosal administration, penetrants appropriate to the barrier to be permeated are used in the formulation. Such penetrants are generally known in the art.

[0585] For oral administration, the compounds can be formulated readily by combining the active compounds with pharmaceutically acceptable carriers well known in the art. Such carriers enable the compounds of the invention to be formulated as tablets, pills, dragees, capsules, liquids, gels, syrups, slurries, suspensions, and the like, for oral ingestion by a patient. Pharmacological preparations for oral use can be made using a solid excipient, optionally grinding the resulting mixture, and processing the mixture of granules, after adding suitable auxiliaries if desired, to obtain tablets or dragee cores. Suitable excipients are, in particular, fillers such as sugars, including lactose, sucrose, mannitol, or sorbitol; cellulose preparations such as, for example, maize, starch, wheat starch, rice starch, potato starch, gelatin, gum tragacanth, methyl cellulose, hydroxypropylmethylcellulose, sodium carbomethylcellulose; and/or physiologically acceptable polymers such as polyvinylpyrrolidone (PVP). If desired, disintegrating agents may be added, such as cross-linked polyvinyl pyrrolidone, agar, or alginic acid or a salt thereof such as sodium alginate.

[0586] Dragee cores are provided with suitable coatings. For this purpose, concentrated sugar solutions may be used which may optionally contain gum arabic, talc, polyvinyl pyrrolidone, carbopol gel, polyethylene glycol, titanium dioxide, lacquer solutions and suitable organic solvents or solvent mixtures. Dyestuffs or pigments may be added to the tablets or dragee coatings for identification or to characterize different combinations of active compound doses.

[0587] Pharmaceutical compositions, which can be used orally, include push-fit capsules made of gelatin as well as soft, sealed capsules made of gelatin and a plasticizer, such as glycerol or sorbitol. The push-fit capsules may contain the active ingredients in admixture with filler such as lactose, binders such as starches, lubricants such as talc or magnesium stearate and, optionally, stabilizers. In soft capsules, the active ingredients may be dissolved or suspended in suitable liquids, such as fatty oils, liquid paraffin, or liquid polyethylene glycols. In addition, stabilizers may be added. All formulations for oral administration should be dosages suitable for the chosen route of administration.

[0588] For buccal administration, the compositions may take the form of tablets or lozenges formulated in conventional manner.

[0589] For administration by nasal inhalation, the active ingredients for use according to the present invention are conveniently delivered in the form of an aerosol spray presentation from a pressurized pack or a nebulizer with the use of a suitable propellant, e.g., dichlorofluoromethane, trichlorofluoromethane, dichlorotetrafluoroethane or carbon dioxide. In the case of a pressurized aerosol, the dosage unit may be determined by providing a valve to deliver a metered amount. Capsules and cartridges of, e.g., gelatin for use in a dispenser may be formulated containing a powder mix of the compound and a suitable powder base such as lactose or starch.

[0590] The preparations described herein may be formulated for parenteral administration, e.g., by bolus injection or continuous infusion. Formulations for injection may be presented in unit dosage form, e.g., in ampoules or in multidose containers with optionally, an added preservative. The compositions may be suspensions, solutions or emulsions in oily or aqueous vehicles, and may contain formulatory agents such as suspending, stabilizing and/or dispersing agents.

[0591] Pharmaceutical compositions for parenteral administration include aqueous solutions of the active preparation in water-soluble form. Additionally, suspensions of the active ingredients may be prepared as appropriate oily or water based injection suspensions. Suitable lipophilic solvents or vehicles include fatty oils such as sesame oil, or synthetic fatty acids esters such as ethyl oleate, triglycerides or liposomes. Aqueous injection suspensions may contain substances, which increase the viscosity of the suspension, such as sodium carboxymethyl cellulose, sorbitol or dextran. Optionally, the suspension may also contain suitable stabilizers or agents which increase the solubility of the active ingredients to allow for the preparation of highly concentrated solutions.

[0592] Alternatively, the active ingredient may be in powder form for constitution with a suitable vehicle, e.g., sterile, pyrogen-free water based solution, before use.

[0593] The preparation of the present invention may also be formulated in rectal compositions such as suppositories or retention enemas, using, e.g., conventional suppository bases such as cocoa butter or other glycerides.

[0594] Pharmaceutical compositions suitable for use in context of the present invention include compositions wherein the active ingredients are contained in an amount effective to achieve the intended purpose. More specifically, a therapeutically effective amount means an amount of active ingredients effective to prevent, alleviate or ameliorate symptoms of disease or prolong the survival of the subject being treated.

[0595] Determination of a therapeutically effective amount is well within the capability of those skilled in the art.

[0596] For any preparation used in the methods of the invention, the therapeutically effective amount or dose can be estimated initially from in vitro assays. For example, a dose can be formulated in animal models and such information can be used to more accurately determine useful doses in humans.

[0597] Toxicity and therapeutic efficacy of the active ingredients described herein can be determined by standard pharmaceutical procedures in vitro, in cell cultures or experimental animals. The data obtained from these in vitro and cell culture assays and animal studies can be used in formulating a range of dosage for use in human. The dosage may vary depending upon the dosage form employed and the route of administration utilized. The exact formulation, route of administration and dosage can be chosen by the individual physician in view of the patient's condition. (See e.g., Fingl, et al., 1975, in “The Pharmacological Basis of Therapeutics”, Ch. 1 p. 1).

[0598] Depending on the severity and responsiveness of the condition to be treated, dosing can be of a single or a plurality of administrations, with course of treatment lasting from several days to several weeks or until cure is effected or diminution of the disease state is achieved.

[0599] The amount of a composition to be administered will, of course, be dependent on the subject being treated, the severity of the affliction, the manner of administration, the judgment of the prescribing physician, etc.

[0600] Compositions including the preparation of the present invention formulated in in compatible pharmaceutical carrier may also be prepared, placed in an appropriate container, and labeled for treatment of an indicated condition.

[0601] Pharmaceutical compositions of the present invention may, if desired, be presented in a pack or dispenser device, such as FDA approved kit, with a contain one or more unit dosage forms containing the active ingredient. The pack may, for example, comprise metal or plastic foil, such as a blister pack. The pack or dispenser may also be accommodated by a notice associated with the container in a dispenser may also be accommodated by a notice associated with the container in a form prescribed by a governmental agency regulating the manufacture use or sale of pharmaceuticals, which notice is reflective of approval by the agency of the form of the compositions or human or veterinary administration. Such notice, for example, may be of labeling approved by the U.S. Food and Drug Administration for prescription drugs or of an approved product insert.

[0602] It will be appreciated that treatment of a disease according to the present invention may be combined with other prior art treatment methods, also known as combination therapy.

[0603] As mentioned hereinabove, the splice variants of the present invention may also have diagnostic value. For example, the present inventors uncovered soluble extracellular isoforms of follicular stimulating hormone receptor (FSHR, GenBank Accession: FSHR_human) and lutheizing hormone receptor [LSHR_human, see Table 3 below), each of which can serve as a diagnostic marker for fertility and menopausal disorders.

[0604] Thus, the present invention envisages diagnosing in a subject predisposition to, or presence of a disease which depends on expression and/or activity of a biomolecular sequence of the present invention for its onset or progression or is associated with abnormal activity or expression of a biomolecular sequence of the present invention.

[0605] As used herein the term “diagnosing” refers to classifying a disease or a symptom, determining a severity of the disease, monitoring disease progression, forecasting an outcome of a disease and/or prospects of recovery.

[0606] Diagnosis of a disease according to the present invention can be effected by determining a level of a polynucleotide or a polypeptide of the present invention in a biological sample obtained from the subject, wherein the level determined can be correlated with predisposition to, or presence or absence of the disease.

[0607] As used herein, the term “level” refers to expression-levels of RNA and/or protein or to DNA copy number of a splice variant of the present invention. Typically the level of the splice variant in a biological sample obtained from the subject is different (i.e., increased or decreased) from the level of the same variant in a similar sample obtained from a healthy individual.

[0608] As used herein “a biological sample” refers to a sample or fluid isolated from a subject, including but not limited to, for example, plasma, serum, spinal fluid, lymph fluid, the external sections of the skin, respiratory, intestinal, and genitourinary tracts, tears, saliva, mil, blood cells, tumors, neuronal tissue, organs, and also samples of in vivo cell culture constituents.

[0609] Numerous well known tissue or fluid collection methods can be utilized to collect the biological sample from the subject in order to determine the level of DNA, RNA and/or polypeptide of the variant of interest in the subject.

[0610] Examples include, but are not limited to, fine needle biopsy needle biopsy, core needle biopsy and surgical biopsy (e.g., brain biopsy).

[0611] Regardless of the procedure employed, once a biopsy is obtained the level of the variant can be determined and a diagnosis can thus be made.

[0612] Determining the level of the same variant normal tissues of the same origin is preferably effected along-side to detect an elevated expression and/or amplification.

[0613] Typically, detection of a nucleic acid of interest in a biological sample is effected by hybridization-based assays using an oligonucleotide probe.

[0614] Hybridization based assays which allow the detection of a variant of interest (i.e., DNA or RNA) in a biological sample rely on the use of oligonucleotide which can be 10, 15, 20, or 30 to 100 nucleotides long preferably from 10 to 50, more preferably from 40 to 50 nucleotides.

[0615] Hybridization of short nucleic acids below 200 bp in length, e.g. 17-40 bp in length) can be effected using the following exemplary hybridization protocols which can be modified according to the desired stringency; (i) hybridization solution of 6×SSC and 1% SDS or 3 M TMACI, 0.01 M sodium phosphate (pH 6.8), 1 mM EDTA (pH 7.6), 0.5% SDS, 100 μg/ml denatured salmon sperm DNA and 0.1% nonfat dried milk, hybridization temperature of 1-1.5° C. below the Tₘ, final wash solution of 3 M TMACI, 0.01 M sodium phosphate (pH 6.8), 1 mM; EDTA (pH 7.6), 0.5% SDS at 1-1.5° C. below the Tₘ; (ii) hybridization solution of 6×SSC and 0.1% SDS or 3 M TMACI, 0.01 M sodium phosphate (pH 6.8), 1 mM EDTA (pH 7.6), 0.5% SDS, 100 μg/ml denatured salmon sperm DNA and 0.1% nonfat dried milk, hybridization temperature of 2-2.5° C. below the Tₘ, final wash solution of 3 M TMACI, 0.01 M sodium phosphate (pH 6.8), 1 EDTA (pH 7.6), 0.5% SDS at 1-1.5° C. below the Tₘ, final wash solution of 6×SSC, and final wash at 22° C.; (ii) hybridization solution of 6×SSC and 1% SDS or 3 M TMACI, 0.01 M sodium phosphate (pH 6.8), 1 mM EDTA (pH 7.6), 0.5% SDS, 100 μg/ml denatured salmon sperm DNA and 0.1% nonfat dried milk, hybridization temperature.

[0616] The detection of hybrid duplexes can be carried out by a number of methods. Typically, hybridization duplexes are separated from unhybridized nucleic acids and the labels bound to the duplexes are then detected. Such labels refer to radioactive, fluorescent, biological or enzymatic tags or labels of standard use in the art. A label can be conjugated to either the oligonucleotide probes or the nucleic acids derived from the biological sample.

[0617] For example, oligonucleotides of the present invention can be labeled subsequent to synthesis, by incorporating biotinylated dNTPs or rNTP, or some similar means (e.g., photo-cross-linking a psoralen derivative of biotin to RNAs), followed by addition of labeled streptavidin (e.g., phycoerythrin-conjugated streptavidin) or the equivalent. Alternatively, when fluorescently-labeled oligonucleotide probes are used, fluorescein, lissamine, phycoerythrin, rhodamine (Perkin Elmer Cetus), Cy2, Cy3, Cy3.5, Cy5, Cy5.5, Cy7, FluorX (Amersham) and others [e.g., Kricka et al. (1992), Academic Press San Diego, Calif] can be attached to the oligonucleotides.

[0618] Traditional hybridization assays include PCR, RT-PCR, Real-time PCR, RNase protection, in-situ hybridization, primer extension, Southern blot, Northern Blot and dot blot analysis.

[0619] Those skilled in the art will appreciate that wash steps may be employed to wash away excess target DNA or probe as well as unbound conjugate. Further, standard heterogeneous assay formats are suitable for detecting the hybrids using the labels present on the oligonucleotide primers and probes.

[0620] It will be appreciated that a variety of controls may be usefully employed to improve accuracy of hybridization assays. For instance, samples may be hybridized to an irrelevant probe and treated with RNAse A prior to hybridization, to assess false hybridization.

[0621] It will be appreciated that antisense oligonucleotides may be employed to quantify expression of a “splice isoform of interest. Such detection is effected at the pre-mRNA level. Essentially the ability to quantitate transcription from a splice site of interest can be effected based on splice site accessibility. Oligonucleotides may compete with splicing factors for the splice site sequences. Thus, low activity of the antisense oligonucleotide is indicative of splicing activity [see Sazani and Kole (2003), supra].

[0622] Polymerase chain reaction (PCR)-based methods may be used to identify the presence of an mRNA off interest. For PCR-based methods a pair of oligonucleotides is used, which is specifically hybridizable with the polynucleotide sequences described hereinabove in an opposite orientation so as to direct exponential amplification of a portion thereof (including the herein above described sequence alteration) in a nucleic acid amplification reaction. Examples, of oligonucleotide pair of primers which can be used to detect variants of the present invention are listed in Table 2, below.

[0623] The polymerase chain reaction and other nucleic acid amplification reactions are well known in the art and require no further description herein. The pair of oligonucleotides according to this aspect of the present invention are preferably selected to have compatible melting temperatures (Tm), e.g., melting temperatures which differ by less than that 7° C., preferably less than 5° C., more preferably less than 4° C., most preferably less than 3° C., ideally between 3° C. and 0° C.

[0624] Hybridization to oligonucleotide arrays may be also used to determine expression of variants of the present invention. Such screening has been undertaken in the BRCA1 gene and in the protease gene of HIV-1 virus [see Hacia et al., (1996) Nat Genet 1996; 14(4):441-447; Shoemaker et al., (1996) Nat Genet 1996; 14(4):450-456; Kozal et al., (1996) Nat Med 1996; 2(7):753-759].

[0625] The nucleic acid sample which includes the candidate region to be analyzed is isolated, amplified and labeled with a reporter group. This reporter group can be a fluorescent group such as phycoerythrin. The labeled nucleic acid is then incubated with the probes immobilized on the chip using a fluidics station. For example, Manz et al. (1993) Adv in Chromatogr 1993; 33:1-66 describe the fabrication of fluidics devices and particularly microcapillary devices, in silicon and glass substrates.

[0626] Once the reaction is completed, the chip is inserted into a scanner and patterns of hybridization are detected. The hybridization data is collected, as a signal emitted from the reporter groups already incorporated into the nucleic acid, which is now bound to the probes attached to the chip. Since the sequence and position of each probe immobilized on the chip is known, the identity of the nucleic acid hybridized to a given probe can be determined.

[0627] It will be appreciated that when utilized along with automated equipment, the above described detection methods can be used to screen multiple samples for diseases both rapidly and easily.

[0628] The presence of the variant of interest may also be detected at the protein level. Numerous protein detection assays are known in the art, examples include, but are not limited to, chromatography, electrophoresis, immunodetection assays such as ELISA and western blot analysis, immunohistochemistry and the like, which may be effected using antibodies specific to the variants of the present invention.

[0629] Preferably used are antibodies, which specifically interact with the polypeptide variants of the present invention and not with wild type.

[0630] The diagnostic reagents described hereinabove can be included in diagnostic kits. For example a kit for diagnosing a fertility disorder in a subject can include the set of oligonucleotide primers set forth in SEQ ID NOs: 9 and 10 in a container and as second container with appropriate buffers and preservatives for executing a PCR reaction.

[0631] Diagnostics using the above-described methodology can be validated using other diagnostic methods which are well known in the art such as by imaging, molecular detection of known markers and the like.

[0632] Apart of clinical applications, the biomolecular sequences of the present invention can find other commercial uses such as in the food, agricultural electromechanical, optical and cosmetic, D industries [http://.physics.unc.edu/˜rsuper/XYZweb/XYZchipbiomotors.rs1.doc; http://www.bio.org/er/industrial.asp]. For example, newly uncovered gene products, which can disintegrate connective tissues, can be used as potent anti scarring agents for cosmetic purposes. For example, newly uncovered gene products, which can disintegrate connective tissues, can be used as potent anti scanning agents for cosmetic purposes. Non-limiting examples of such gene products include the matrix metalloproteinase family of proteins (MMP), which are a group of proteases having varying specificities for ECM components as substrates, non-limiting examples of which have the gene symbols “CLG” and “CGL4B” in, the attached files. These proteins are involved in ECM break-down as part of the wound healing process, for example for cell migration. The activity of these proteins is also modulated by specific tissue inhibitors of MMPs (TIMP) and other factors in the microenvironment in and around the wound area. Therefore, one possible optionally application for the present invention would be the selection of appropriate antisense oligonucleotides for either one or more MMPs and/or for factors related to TIMPs, in order to modulate wound healing activities (and/or as previously noted, for treatment of arthritis).

[0633] As another optional treatment, production of collagen may be optionally modulated through the use of appropriate antisense oligonucleotides. Collagen is an important connective tissue element, but is also involved in pathological conditions such as fibrosis and the formation of adhesions between tissues of different organs, a condition which may occur for example after surgery. Therefore, modulation of collagen production, for example to reduce collagen production, may optionally be performed according to the present invention.

[0634] Other applications include, but are not limited to, the making of gels, emulsions, foams and various specific products, including photographic films, tissue replacers and adhesives, food and animal feed, detergents, textiles, paper and pulp, and chemicals manufacturing (commodity and fine, e.g., bioplastics).

[0635] Research applications include, for example, differential cloning, detection of rearrangements in DNA sequences as disclosed in U.S. Pat. No. 5,994,320, drug discovery and the like.

[0636] As used herein the term “about” refers to ±10%.

[0637] Additional objects, advantages, and novel features of the present invention will become apparent to one ordinarily skilled in the art upon examination of the following examples, which are not intended to be limiting. Additionally, each of the various embodiments and aspects of the present invention as delineated hereinabove and as claimed in the claims section below finds experimental support in the following examples.

### EXAMPLES

[0638] Reference is now made to the following examples, which together with the above descriptions, illustrate the invention in a non limiting fashion.

[0639] Generally, the nomenclature used herein and the laboratory procedures utilized in the present invention include molecular, biochemical, microbiological and recombinant DNA techniques. Such techniques a thoroughly explained in the literature. See, for example, “Molecular Cloning: A laboratory Manual” Sambrook et al., (1989); “Current Protocols in Molecular Biology” Volumes I-III Ausubel, R. M., ed. (1994); Ausubel et al., “Current Protocols in Molecular Biology”, John Wiley and Sons, Baltimore, Md. (1989); Perbal, “A Practical Guide to Molecular Cloning”, John Wiley & Sons, New York (1988); Watson et al., “Recombinant DNA”, Scientific American Books, New York; Birren et al. (eds) “Genome Analysis: A Laboratory Manual Series”, Vols. 1-4, (Cold Spring Harbor Laboratory Press, New York (1998); methodologies as set forth in U.S. Pat. Nos. 4,666,828; 4,683,202; 4,801,531; 5,192,659 and 5,272,057; “Cell-Biology: A Laboratory Handbook”; Volumes I-III Cellis; J. E., ed. (1994); “Current Protocols in Immunology” Volumes I-III Coligan J. E., ed., (1994); Stites et al. (eds), “Basic & and Clinical Immunology” (8th Edition), Appleton & Lange, Norwalk, Conn. (1994); Mishell and Shiigi (eds), “Selected Methods in Cellular Immunology”, W. H. Freeman and Co., New York (1980); available immunoassays are extensively described in the patent and scientific literature, see, for example, U.S. Pat. Nos. 3,791,932; 3,839,153; 3,850,752; 3,850,578; 3,853,987; 3,8671,517; 3,879,262; 3,901,654; 3,935,074; 3,984,533, 3,996,345; 4,034,074; 4,098,876; 4,879,219; 5,011,771 and 5,281,521; “Oligonucleotide Synthesis” Gat, M. J., ed. (1984); “Nucleic Acid Hybridization” Hames; B. D., and Higgins S. J., eds. (1985); “Transcription and Translation” Hames, B. D., and Higgins S. J., Eds. (1984); “Animal Cell Culture”. Freshney, R. I., ed.; (1986); “Immobilized Cells and Enzymes” IRL Press, (1986); “A Practical Guide to Molecular Cloning” Perbal, B., (1984) and “Methods in Enzymology” Vol. 1-3177, Academic Press; “PCR Protocols: A Guide To Methods and Applications”, Academic Press, San Diego, Calif. (1990); Marshak et al., “Strategies for Protein Purification and Characterization—A Laboratory Course Manual” CSHL Press (1996); all of which are incorporated by reference as if fully set forth herein. Other general references are provided throughout this document. The procedures therein are believed to be well known in the art and are provided for the convenience of the reader. All the information contained therein is incorporate by reference.

### Example 1

### Computational Identification of Alternative Splicing without Usage of Expressed Sequence Data and “Alternativeness Score”

[0640] Background

[0641] Alternative splicing is a mechanism by which multiple gene products are generated from a single gene. Currently, the only way for large-scale computational detection of alternative splicing is by Expressed Sequence Tags (ESTs) analysis, and microarray technology.

[0642] While reducing the present invention to practice, the present inventors designed a new approach for computational identification of splice variants without needing expressed sequence data. The present inventors have first uncovered that alternatively spliced exons have unique characteristics differentiating them from constitutively spliced ones. Using machine-learning techniques, a combination of these characteristics was found to identify alternatively spliced exons with very high probability.

[0643] Experimental Procedures

[0644] Compiling the training sets of conserved alternative and constitutive exons—Human and ESTs and cDNAs were obtained from NCBI GenBank version 131 (August 2002) (www.ncbi.nlm.nih.gov/dbEST) and aligned to the human genome build 30 (August 2002) (www.ncbi.nlm.nih.gov/genome/guide/human) using the LEADS clustering and assembly system as described in Sorek et al. (2002) Genome Res. 12:1060-1067. Briefly, the software cleans expressed sequences from repeats, vector contaminations and immunoglobulins. It then aligns expressed sequences to the genome taking alternative splicing into account, and clusters overlapping expressed sequences into “clusters” that represent genes or partial genes.

[0645] Alternatively spliced internal exons and constitutively spliced internal exons were identified using the same methods described in Sorek et al. (2002). In brief, these methods screen for reliable exons requiring canonical splice sites and discarding possible genomic contamination events. A constitutively spliced internal exon was defined as an internal exon supported by at least 4 sequences, for which no alternative splicing was observed. An alternatively spliced internal exon was defined as such if there was at least one sequence that contained both the internal exon and the 2 flanking exons (exon inclusion), and one sequence that contained the two flanking exons but skipped the middle one (exon skipping).

[0646] Mouse ESTs and cDNAs from GenBank version 131 were aligned to the human genome build 30 as follows. Mouse ESTs and cDNAs were cleaned from terminal vector sequences, and low complexity stretches and repeats in the expressed sequences were masked. Sequences with internal vector contamination were discarded. Sequences identified as immunoglobulins or T-cell receptors were discarded. In the next stage, expressed sequences were heuristically compared to the genome to find likely high-quality hits. They were then aligned to the genome using a spliced alignment model that allows long gaps. Single hits of mouse expressed sequences to the human genome shorter than 20 bases, or having less than 75% identity to the human genome, were discarded. Using these parameters, 1,341,274 mouse ESTs were mapped to the human genome, 511,381 of them having all their introns obeying the GT/AG or GC/AG rules.

[0647] To determine if the borders of a human intron (which define the borders of the flanking exons) were conserved in mouse, a mouse EST spanning the same intron-borders while aligned to the human genome was required (with alignment of at least 25 bp on each side of the exon-exon junction). In addition, this mouse EST was required to span an intron (i.e., open a long gap) at the same position along the EST while aligned to the mouse genome.

[0648] Alignment of intronic regions was done using sim4 (Florea (1998) Nat. Rev. Genet. 3:285-298]. An alignment was considered significant according to sim4 default parameters, i.e., at least one word of 10 consecutive identical nucleotides. Lengths of alignments and identity levels were parse from sim4 standard output. For per-position conservation calculation, the GCG GAP program was run of the 100 intronic nucleotides from each side of the exon, and the alignments were achieved.

[0649] Compilation of dataset of 110,932 human exons with mouse orthologues—Human and ESTs and cDNAs were obtained from NCBI GenBank version 136 (2003) (www.ncbi.nlm.nih.gov/dbEST) and were mapped to the human genome April 2003 assembly (www.ncbi.nlm.nih.gov/genome/guide/human) using the spliced alignment module of LEADS. For each expressed sequence, all mappings of internal exons on the human genome were retrieved. Only exons flanked by AG/GT or AG/GC splice sites were allowed 185,799 human exons mapped to the human genome were thus retrieved.

[0650] To find the mouse orthologue for each human exon, mouse expressed sequences from GenBank version 136 were first aligned to the human genome, as described above. Mouse sequences exactly spanning human exons were aligned to the mouse genome as well, and the corresponding sequence on the mouse genome was declared as the orthologous mouse exon, if AG/GT or AG/GC legal splice sates flanked it.

[0651] Human exons for which no spanning mouse expressed sequence was detected were aligned directly to the mouse genome using the LEADS “cluster” module. Hits spanning the full length of the exon, that were flanked by AG/GT or AG/GC legal splice sites, were declared as the orthologous mouse exons.

[0652] Altogether, these searches retrieved 110,932 pairs of exons in the human and mouse genomes. For each such exon, all classifying, parameters were calculated as follows. Conservation between exons was calculated from aligning the human exon to the mouse exon using the sim4 alignment program. Conservation in the flanking intronic sequences was calculated as described above (in the “Compiling the training sets.” section of the methods). Exon size and dividability by 3 were retrieved from the exon sequence itself. Score was calculated for each exon as described in the results section.

[0653] Results

[0654] The present inventors have previously compiled sets of alternatively spliced (cassette) and constitutively spliced exons that are conserved between human and mouse [Sorek (2003) Genome Res. 13:1631-1637]. Interestingly, alternatively spliced exons were found to be frequently flanked by intronic sequences conserved between human and mouse, but constitutively spliced exons were not [Sorek (2003) supra and FIGS. 1a-b, as described below and in Table 1]. Such conserved intronic sequences are probably involved in the regulation of alternative splicing.

[0655] The training sets of exons used herein initially contained 243 alternative exons and 1966 constitutive exons. These sets were based on EST analyses of GenBank 131, where the constitutive exons were defined as such if there were at least 4 expressed sequences supporting them, and no EST skipping them, both in human and in mouse. For the present analysis constitutive exons for which an evidence for alternative splicing appeared in the newer version of GenBank, 136 were eliminated to provide a training set of 1753 constitutive exons.

[0656] Further features that distinct alternatively spliced exons from constitutively spliced exons were then sought. FIGS. 1a-e show structural differences between alternatively spliced exons and constitutively spliced exons. FIG. 1a shows high level of sequence conservation in the last 100 nucleotides of introns flanking alternative exons but not constitutive exons. A conserved sequence region refers to length of alignment between human and mouse DNA in that region. Similar conservation was seen in the first 100 nucleotides of downstream introns flanking alternative exons (FIG. 1b). Furthermore, alternatively spliced exons exhibited much higher level of human-mouse sequence conservation (i.e., 50% of exons showed more than 95% identity) than constitutively spliced exons (i.e., 50% of constitutively spliced exons showed 90% identity, see FIG. 1c). The size of alternative splices exons was found to be shorter than that of constitutive exons (FIG. 1d). Essentially, the average length of alternative exon (i.e., 50% of the exon data set) was about 75, while the average length of constitutive exons was almost twice as much. Finally, highly conserved exons which are divisible by 3 where much more frequent in the alternative exon dataset than in the constitutive exon dataset (FIG. 1e). Table l below, summarizes the major classifying features which were found.

TABLE 1
Features differentiating between alternatively spliced exons and
constitutively spliced exons

| | Alternatively | Constitutively | |
|---|---|---|---|
| | spliced exons | spliced exons | P value^{a} |
| Average size | 87 | 128 | p < 10⁻¹⁶ |
| Percent exons that are a multiple of 3 | 73% | 37% | p < 10⁻⁹ |
| | (177/243) | (642/1753) | |
| Average human-mouse exon conservation | 94% | 89% | p < 10⁻³⁶ |
| Percent exons with upstream intronic | 92% | 45% | p < 10⁻¹¹ |
| elements conserved in mouse^{b} | (223/243) | (788/1753) | |
| Percent exons with downstream intronic | 82% | 35% | p < 10⁻¹⁴ |
| elements conserved in mouse^{b} | (199/243) | (611/1753) | |
| Percent exons with both upstream and | 77% | 17% | p < 10⁻³⁷ |
| downstream intronic elements conserved in | (188/243) | (292/1753) | |
| mouse^{b} | | | |

^{a}P value was calculated using Fisher's exact test, except for the “average size” and “average human-mouse exon conservation”, for which p value was calculated using student's T test.
^{b}Conservation was detected in the 100 intronic nucleotides immediately upstream or downstream the exon using local alignment with the mouse 100 counterpart intronic nucleotides. A minimum hit was 12 consecutive perfectly matching nucleotides.

[0657] In short, conserved alternatively spliced exons are much shorter than constitutively spliced ones, their size tends to be a multiple of 3, and they share higher identity level with their mouse counterpart exon (FIGS. 1c-e). These differences probably stem from the unique function of the alternative exons: Since these exons are cassette exons that are sometimes inserted and sometimes skipped, they should be dividable by 3 such that the reading frame is kept when skipped. This constraint does not apply to constitutively spliced exons. The higher identity level between human and mouse could be explained by the fact that alternatively spliced exons frequently contain sequences that regulate their splicing [exonic splicing enhancers and silencers, reviewed by Cartegni (2002). Nat. Rev. Genet. 3:285-298]. These regulatory sequences add another level of conservation constraint on the exon sequence. The fact that alternatively spliced exons are smaller than constitutively spliced ones was previously reported [Thanaraj (2003) Prog. Mol. Subcell. Biol. 31:1-31] and may be attributed to the fact that the spliceosome sub-optimally recognizes smaller exons [Berget (1995) J. Biol. Chem. 270(6):2411-4].

[0658] The above-described sequence features can be used to identify alternatively spliced exons in the human and the mouse genomes. However, each feature by itself is not strong enough to classify an exon. Therefore a combination of features that would exclusively “define” alternative exons was determined by complete iteration on the above-described training sets of alternative and constitutive exons. The classifying parameters that were iterated over were the following: Exon length, dividable/not dividable by 3, percent identity when aligned to the mouse counterpart, length of conserved intronic sequence in the 100 bases immediately upstream the exon, identity level in the conserved upstream intronic sequence stretch, length of conserved intronic sequence in the 100 bases immediately downstream the exon, and identity level in the downstream conserved intronic sequence stretch. The output was a set of rules, from which a specific combination that would supply maximum specificity for identifying alternatively spliced exons was searched.

[0659] The best combination from this iteration was the following: At least 95% identity with the mouse exon counterpart; exon size is a multiple of 3; at least 15 conserved intronic nucleotides out of the first 100 nucleotides downstream the exon; and at least 12 conserved intronic nucleotides upstream the exon with at least 85% identity. 76 exons, or 31% of the training set of 243 alternatively spliced exons, exhibited this combination of features. However, none of the exons from the set of 1753 constitutively spliced exons matched these features.

[0660] The above combination of parameters can therefore be used to identify alternatively spliced exons with very high specificity and ˜30% sensitivity.

[0661] To test this 110,932 human exons were collected, for which a mouse counterpart could be identified (see methods). For each of these exons, all classifying parameters were calculated.

[0662] Out of the 110,932 human exons, 1,030, or ˜1%, were found to comply with the above-mentioned combination of parameters. To check if these exons are indeed alternatively spliced, human expressed sequences (ESTs or cDNAs) that skip the exons but contain the two exons flanking it were searched. For 518 (50%) of the candidate alternative exons there was such skipping evidence. For comparison, only 7% out of the entire set of 110,932 human exons had similar skipping EST evidence. This means that the combination of parameters, which were chosen indeed caused alternatively spliced exons to be retrieved.

[0663] The remaining 512 candidate alternative exons were manually examined using the UCSC genome browser (April 2003), and found that for 195 additional exons there was a human expressed sequence showing patterns of alternative splicing other than exon skipping (e.g., intron retention, alternative donor/acceptor, mutually exclusive exons). Thus, 707 (69%) of the candidate alternative exons identified by the above-described methodology were supported by independent evidence for alternative splicing deriving from dbEST and RefSeq.

[0664] But what about the remaining 317 (311%) of the candidate exons? These can still be alternatively spliced exons for which not enough ESTs exist, so that a skipping variant has not appeared in dbEST yet. Indeed, while on average there were 32 supporting expressed sequences per exon in the general set of 110,932 exons (median 10), the support for the 317 candidate alternatives was much smaller, averaging in 14 sequences (median 7).

[0665] The method of identifying cassette exons without using ESTs, as described herein, allows estimation of the absolute number of alternatively spliced exons in the human genome. The above-described results show that the combination of characteristics presented herein identifies 31% of the cassettes exons in the training set. This combination retrieved 1,030 (1%) out of the 110,932 exons tested. It can thus be concluded that 1%/0.31, or ˜3% of all human exons, are alternatively spliced in an exon skipping manner. Moreover, the exons in the initial training set of 243 cassette exons were all alternatively spliced in a pattern of exon skipping so that the present method would retrieve main sipped exons. Exon skipping is known to comprise only about 50% of all types of alternative splicing, with other types, such as alternative donor/acceptor, mutually exclusive exons, and intron retention comprise the remaining 50%. Therefore it is estimated that up to 2-3% (i.e., 6%) of all human exons, are alternatively spliced. As the human genome contains ˜210,000 exons [Lander (2001) Nature 409:860-921], 6% or ˜12,000 exons, are alternatively spliced.

[0666] Understanding this it is now possible to devise an “alternativeness score” that reports on the probability that a given exon is alternatively spliced. The characterizing features are characterized for a given exon (length of conserved introns upstream and downstream, exon length, conservation with mouse counterpart exon, and dividability by 3). Then, the fraction of alternative exons from the training set of 243 alternative exons (let X be this number) that answers to this combination of parameters is calculated (have intronic conservation greater or equal to its intronic conservation; have length lesser or equal to its length; has exon conservation greater or equal to its exon conservation; and divides/not divides by 3 as the tested exon). Similarly, the fraction of constitutive exons is calculated from the set of 1753 that answers to this combination of parameters (let Y be this number). Then the fraction of alternative exons is multiplied by 12,000 (the actual number of alternatives in the human genome), and the fraction of constitutive exons by 200,000 (the actual number of constitutive exons in the human genome). The sum of the resulting numbers is the actual number of exons that have this combination of parameters that are expected to be found in the human genome. The “alternativeness score” is the number of predicted alternative exons divided by the above-described sum.

[0667] Presenting this mathematically, the “alternativeness score” (denoted as “A”) is:
A=(X*12,000)/(X*12,000+Y*200,000)

[0668] As an example the following parameters are used:

[0669] Size 123 bp

[0670] Divided by 3

[0671] Length of upstream conserved region: 73 bp

[0672] Length of downstream conserved region: 100 bp

[0673] Human-Mouse exon conservation: 96%

[0674] 13 out of 243 (X=5.3%) alternative exons have these features, while 1/1753 (0.05%) constitutive exons have these features. 5.3%×12,000=636 and 0.05%×200,000=100.

[0675] Therefore, the alternativeness score A is: A=636/(636+100)=86%.

[0676] Using this alternativeness scoring, 4042 exons in the human genome exhibited a score of 100%, 749 additional exons exhibited a score between 90% to 100% and 2032 exons exhibited a score between 80% to 90%.

[0677] The classification rule that was chosen for the experimental verification retrieves alternatively spliced exons with a very high specificity (less than 0.3% false positive rate) but at the price of a relatively low sensitivity (32%). Other rules can be chosen in which sensitivity is higher, but naturally this would increase the false positive rate of the prediction. FIG. 6 presents a sensitivity versus false positive rate plot (ROC curve) for different rules selecting for increasing number of alternative exons from our test set of 243 exons. As shown in the figure, it is possible to employ a rule that would identify up to 73% of the alternative exons, but this rule would also retrieve 36% of the constitutively spliced exons (the upper limit of 73% is due to the Boolean nature of the “divisibility by 3” feature). Note, that since most of the exons in the human genome are constitutive, such a rule would have low predictability for exon skipping: Assuming, for example, that ˜10%, or 20,000 out of the ˜200,000 predicted exons in the human genome, are alternative, the probability that an exon identified by, the 73%:36% rule would really be alternative is only 18% (0.73*20,000/[0.73*20,000+0.36*180,000]). Therefore, preferably a rule is selected with close to zero false positives. The curve in FIG. 6 presents a variety of alternatives, and allows the selection of a % rule for a desired target specificity or sensitivity. For example, 50% sensitivity is achievable at about 1.8% false positive rate.

### Example 2

### Experimental Evidence for Putative Alternative Exons Uncovered Using the Methodology of the Present Invention

[0678] Biological relevance of computationally identified alternative exons in the absence of EST data support was determine according to RT-PCR results.

[0679] Experimental Procedures

[0680] RT-PCR—RT was done on total RNA samples. RT-PCR reactions were effected using random hexamer primer mix (Invitrogen) and Superscript II Reverse transcriptase (Invitrogen). Conditions used were as follows: denaturation at 70° C. (5 min), annealing on ice, RT at 37° C. (1 hour). “Hot-Star” Taq polymerase (Qiagen) was used in all reaction samples. Some reactions required addition of Q solution (Qiagen) to enhance the reaction. Reaction composition included: total volume of 25 μl, Taq Buffer ×10—2.5 μl, DNTPs (mix of 4) ×12.5—2 μl, Primers—0.5 μl of each (total 1 μl), cDNA—1 μl (1-2 ng/μl), Taq Enzyme—0.5 μl, Q solution (when needed) ×5—5 μl, H₂O was added to complete a final volume of 25 μl.

[0681] Primers are listed in Table 2, below.

TABLE 2

| | | | Predicted | Predicted |
|---|---|---|---|---|
| | | | product | product size |
| | Forward primer/ | Reverse Primer/ | size | of novel |
| Gene | SEQ ID NO: | SEQ ID NO: | (bp) | variant |
| EFNA | ACCGGCCTCACTCTCCAAA | TGGCTCGGCTGACTC | 287 | 206 |
| | TGG/1 | ATGTACGG/2 | | |
| EPHB1 | AAGCTCCAGCATTACAGC | ACCCTCCAGGCGAAT | 324 | 201 |
| | ACAGGCC/3 | GATGTTAGG/4 | | |
| FGF11 | CCAAGGTGCGACTGTGCG | GGTAGAGAGCAGAG | 344 | 233 |
| | G/5 | GCGTACAGGACG/6 | | |
| VLDLR | TGAGCCCCTGAAAGAGTG | TCTAAGCCAATCTTC | 324 | 198 |
| | TCATATAAACG/7 | CTGATGTCTCTTCG/8 | | |
| FSHR | CCTGCTCTACATCAACCCT | CCATAGCTAGGCAGG | 394 | skipping |
| | GAGGCC/9 | GAATGGATCC/10 | | 7: 325; |
| | | | | skipping |
| | | | | 8: 319; |
| | | | | skipping |
| | | | | 7&8: 250; |
| | | | | intron 7 |
| | | | | retention: |
| | | | | 505 |
| NOTCH2 | GAACACGGATGGCGCCTT | GGGGCAAAGTGTATC | 352 | 238 |
| | CC/11 | GATCACCCG/12 | | |
| NTRK2 | GGTCGGGAACATCTCTCGG | GCTCCCTTTTCAGAA | 400 | 211 |
| | TCTATGC/13 | CAATGTTATGTCGC/14 | | |
| PTPRZ1 | AAAAGATGCTGATGGGAT | TGCAGTCTGGAAGCA | 138 | 138 |
| | CCTGGC/15 | TTTCCTGCC/16 | | |
| VEGFC | CAGCACGAGCTACCTCAG | CACTGACAGGTCTCT | 351 | 199 |
| | CAAGACG/17 | TCATCCAGCTCC/18 | | |
| HPSE2 | TCACCTCGTGGACCAGAAT | ACTAAGGGCTGGCCA | 357 | 205 |
| | TTTAACCC/19 | TTCAGTTGC/20 | | |
| HGF | GGATCATCAGACACCACA | CGTGAGGATACTGAG | 302 | 183 |
| | CCGGC/21 | AATCCCAACGC/22 | | |

[0682] Reaction conditions were as follows: Activation of HotStar Taq—95° C. for 5 min; [denaturation—94° C. for 45 sec; annealing—Tm (specific for each set of primers)—4-5° C. for 45 sec; extension—72° C. for 1 min]×34 cycles]; Gap filling—72° C. for 10 min; storage—10° C. Forever.

[0683] Reaction products were separated on % a 2% agarose gel in TBE×5 at ˜150V. DNA was extracted from gel using a Qiaquick (Qiagen) kit, and DNA was sent out for direct sequencing using same primers.

[0684] Tissues and cell-lines—All samples were cDNA pools generated by RT-PCR. Sample 1. Cervix pool—included a pool of 3 cervix derived RNA samples. Samples were of mixed origin (tumor and normal). The cervix pool also included mRNA from HeLa cell-line (cervical cancer). Sample 2: Uterus pool—included a pool of 3 uterus derived RNA samples. Samples were of mixed origin (tumor and normal). Sample 3: Ovary pool—included a pool of 5 normal ovary derived RNA samples (Biochain www.biochain.com). The ovary pool was supplemented with two ovary samples of Mix origin (Tumor and Normal). Sample 4: Placenta—included one sample of Placenta derived RNA of a normal origin (Biochain). Sample 5: Breast Pool—included a pool of 3 breast derived RNA samples of mixed origin (i.e., 2 samples from a tumorous origin and one from a normal origin). Sample 6: Colon and intestine—included a pool of 5 colon derived RNA of mixed origin (tumor and normal). The pool was supplemented with one intestine (Normal) derived RNA sample. Sample 7: Pancreas—included one sample of normal pancreas derived RNA (Biochain). Sample 8: Liver and Spleen pool—included one sample of normal liver derived RNA (Biochain), one sample of normal spleen derived. RNA (Biochain) and one sample of HepG2 cell line (liver tumor) derived RNA. Sample 9: Brain pool—included a pool of normal brain derived RNA samples (Biochain). Sample 10: Prostate pool—included a pool of normal prostate derived RNA samples (Biochain). Sample 11: Testis pool—included a pool of normal testis derived RNA samples (Biochain). Sample 12: Kidney pool—included a pool of normal kidney derived RNA samples (Biochain). Sample 13: Thyroid pool—included a pool of normal thyroid derived RNA samples (Biochain—Normal). Sample 14: Assorted cell-line pool—included a pool of RNA samples from the following cell-lines: DLD, MiaPaCa, HT29, THP1, MCF7 (Obtained from the ATCC, USA).

[0685] Results

[0686] To show that candidate alternative exons for which no EST data exists are indeed alternative, 11 of them were randomly selected for experimental verification. For each of these exons, primers were designed from two flanking exons. RT-PCR reactions were carried out with RNA extractions of 14 different tissue types (FIGS. 2a-i). For 9 of these exons, a skipping splice variant was detected in at least one of the 14 tissues tested. In the tenth genie (VLDLR), it was predicted that exon 9 would be skipped; instead, the RT-PCR showed another type of alternative splicing—retention of intron 8. Only in one out of the 11 genes tested, the predicted skipping was not detected (skipping on exon 7 in FSHR).

[0687] In short, RT-PCR detected alternative splicing in 10 out of 11 predicted cases, in 9 of which this alternative splicing was an exon skipping event as predicted. This reflects a rate of success of at least 80%-90%. Moreover, the fact that the two predicted exon skipping events were not detected does not mean they do not exist, as they could still exist in a tissue other than the 14 that were tested, or in a particular embryonic developmental stage for example.

[0688] A similar protocol was followed for the experimental results in FIG. 2j, except that a different set of primers was used (see Table 8 below).

TABLE 8

Primers used for validation of
alternative exons.

| | | |
|---|---|---|
| Gene and | | |
| direction | Primer sequences | TM |

| | | |
|---|---|---|
| FGF11 | | |
| Forward | 5′-CCAAGGTGCGACTGTGCGG-3′ | 68° C. |
| FGF11 | | |
| Reverse | 5′-GGTAGAGAGCAGAGGCGTACAGGACG-3′ | 66° C. |
| EFNA5 | | |
| Forward | 5′-ACCGGCCTCACTCTCCAAATGG-3′ | 65° C. |
| EFNA5 | | |
| Reverse | 5′-TGGCTCGGCTGACTCATGTACGG-3′ | 67° C. |
| NCOA1 | | |
| Forward | 5′-AGGCAACACGACGAAATAGCCATACC-3′ | 66° C. |
| NCOA1 | | |
| Reverse | 5′-TCTGGCATAAGATGGTTCTCTGCCC-3′ | 65° C. |
| PAM | | |
| Forward | 5′-TGTCCCAGTGCCCGGG-3′ | 61° C. |
| PAM | | |
| Reverse | 5′-GGTGAAATCCACAGCTGACTTGG-3′ | 62° C. |
| GOLGA4 | | |
| Forward | 5′-TCAAGAGAACCTACTTAAGCGTTGTAAGG-3′ | 61° C. |
| GOLGA4 | | |
| Reverse | 5′-TGAGCAATTTCTTCTTCTTTCATTTCC-3′ | 61° C. |
| NPR2 | | |
| Forward | 5′-CATGTTTGGTGTTTCCAGCTTCC-3′ | 62° C. |
| NPR2 | | |
| Reverse | 5′-CGGGTCAGCTCAATGCGC-3′ | 62° C. |
| VLDLR | | |
| Forward | 5′-TGAGCCCCTGAAAGAGTGTCATATAAACG-3′ | 66° C. |
| VLDLR | | |
| Reverse | 5′-TCTAAGCCAATCTTCCTGATGTCTCTTCG-3′ | 66° C. |
| BAZ1A | | |
| Forward | 5′-TGCTCTGATGGTTTTGGAGTTCC-3′ | 61° C. |
| BAZ1A | | |
| Reverse | 5′-CGTTTTTGATATCTATACTTTGCATTTGC-3′ | 60° C. |
| SMARCD1 | | |
| Forward | 5′-CAGCCTTGTCCAAATATGATGCC-3′ | 61° C. |
| SMARCD1 | | |
| Reverse | 5′-AAACTCCCGCTCGTGAGGG-3′ | 61° C. |
| DICER1 | | |
| Forward | 5′-AACTCATTCAGATCTCAAGGTTGGG-3′ | 61° C. |
| DICER1 | | |
| Reverse | 5′-CCAGGTCAGTTGCAGTTTCAGC-3′ | 61° C. |
| HATB | | |
| Forward | 5′-AGGCTTCAGACCTTTTTGATGTGG-3′ | 62° C. |
| HATB | | |
| Reverse | 5′-CTTCCGCTGTAATATCAAGAACTGTAGG-3′ | 61° C. |
| PRKCM | | |
| Forward | 5′-AAGTACTGGGTTCTGGACAGTTTGG-3′ | 61° C. |
| PRKCM | | |
| Reverse | 5′-CTGGTTTGAGGTCACAGTGAACG-3′ | 61° C. |
| RNASE3L | | |
| Forward | 5′-CGGAGAATTTTTGTGTGAAAGGG-3′ | 61° C. |
| RNASE3L | | |
| Reverse | 5′-CCAGCTCCTCCCACTGAAGC-3′ | 61° C. |
| TIAM2 | | |
| Forward | 5′-AACGACAGTCAGGCCAACGG-3′ | 62° C. |
| TIAM2 | | |
| Reverse | 5′-CCAGAAACACCTTCTGAAACTCAAGC-3′ | 62° C. |
| MDA5 | | |
| Forward | 5′-AAATCTGGAGAAGGAGGTCTGGG-3′ | 61° C. |
| MDA5 | | |
| Reverse | 5′-CCACTCTGGTTTTTCCACTCCC-3′ | 61° C. |

[0689] Table 9 shows a description of the results obtained in the experiment (shown in FIG. 2j).

TABLE 9
Experimental validation of predicted alternatively spliced exons

| | | | Type of | |
|---|---|---|---|---|
| | Alt | PCR | alternative | |
| Gene | Exon^{a} | confirmed^{b} | confirmed^{c} | Gene Description |
| FGF11 | 2 | Yes | Skip | fibroblast growth factor 11 |
| EFNA5 | 4 | Yes | Skip | ephrin-A5 |
| NCOA1 | 8 | Yes | Skip | steroid nuclear receptor |
| | | | | coactivator |
| PAM | 22 | Yes | Skip | protein associated with Myc |
| | | | | mRNA |
| GOLGA4 | 9 | Yes | Skip | golgi autoantigen, golgin |
| | | | | subfamily a, 4 |
| NPR2 | 9 | Yes | Skip | natriuretic peptide receptor |
| | | | | B/guanylate cyclase B |
| VLDLR | 9 | Yes | Int Ret^{d} | very low density lipoprotein |
| | | | | receptor |
| BAZ1A | 12 | Yes | Alt 3′ss^{e} | bromodomain adjacent to zinc |
| | | | | finger domain protein 1A |
| SMARCD1 | 7 | Yes | Alt 3′ss^{f} | SWI/SNF related, matrix |
| | | | | associated, actin dependent |
| | | | | regulator of chromatin, subfamily |
| | | | | d, member 1 |
| PRKCM | 15 | No | | protein kinase C, mu |
| TIAM2 | 12 | No | | T-cell lymphoma invasion and |
| | | | | metastasis 2 |
| MDA5 | 4 | No | | melanoma differentiation |
| | | | | associated protein-5 |
| RNASE3L | 15 | No | | nuclear RNase III |
| HAT1 | 7 | No | | histone acetyltransferase 1 |
| DICER1 | 6 | No | | Dicer1, Dcr-1 homolog |
| | | | | (Drosophila) |

^{a}Serial number of exon (out of gene's exons) identified as alternative
^{b}For each predicted exons, primers were designed from its flanking exons and RT_PCR was conducted using total RNA from 14 different tissue types: cervix, uterus, ovary, placenta, breast, colon, pancreas, liver + spleen, brain, prostate, testis, kidney, thyroid, and assorted cell-lines. Products were sequenced, and alternative splicing was searched.
^{c}Type of alternative splicing: Skip, exon-skipping; Alt 3′ss, alternative 3′ splice site (acceptor); Int Ret., intron retention.
^{d}Retention of intron 8 (size 103 nucleotides) was detected in VLDLR.
^{e}Deletion of 86 nucleotides was detected on the 3′ end of exon 12 7 of BAZ1A.
^{f}Extension of 44 nucleotides was detected on the 3′ end of exon 12 of SMARCD1.

### Example 3

### Examples of Annotations for Selected Variants Uncovered Using the Teachings of the Present in Invention

[0690] 500 clinically relevant genes were scanned and manually annotated. These annotations are listed in Table 3, below. Protein structure of the below listed genes and corresponding splice variants are shown in FIGS. 3a-z and 4a-m.

TABLE 3

| | | | | | | Protein |
|---|---|---|---|---|---|---|
| | | | | | | Product - |
| | Gene name | | Mechanism of | CDs features (incl. | | SEQ ID |
| # | and Swissprot | Examples for indications | splicing | Unique sequence) | #pep_num | NOs: |
| 1 | VLDLR | Some variants could be used as soluble | Skipping exons: 8 | Deletion of EGF | 1 | 23, 273 |
| | Very low density | traps for LDL and as such to reduce risk | 9 | Deletion of EGF | 2 | 24, 274 |
| | Lipoprotein Receptor | of heart diseases, Vascular diseases and | 12 | Truncation - | 3 | 25, 275 |
| | LDVR_HUMAN | hypertension. It could also be used as: | | Soluble receptor | | |
| | | Anti hyperlipidemia | 14 | Truncation - | 4 | 26, 276 |
| | | Anti cholesterol | | soluble receptor | | |
| | | Anti gallstones | 15 | Deletion of EGF | 5 | 27, 277 |
| | | | Retention of intron | Truncation - Soluble | 6 | 28, 278 |
| | | | 8 - see FIG. 2i | receptor | | |
| | | | | Confirmed by | | |
| | | | | sequencing | | |
| 2 | VEGFC | Might be used as agonist for | Skipping exon 4 - | Truncates the protein | 7 | 29, 279 |
| | Vascular Endothelial | cardiovascular diseases and diabetes | see FIG. 2b | within VEGF | | |
| | Growth Factor | (agonist of VEGFR2); | | peptide. Probable | | |
| | VEGC_HUMAN | Might be an antagoinst to VEGF | | Elevation of VEGF2 | | |
| | | receptors | | specificity | | |
| | | and as such be used for treatment of | | Confirmed by | | |
| | | cancer, diabetes and Asthma. | | sequencing | | |
| | | Might also be used for Psoriasis. | | | | |
| 3 | FLT1 | Might be an antagonist to VEGF | Skipping exon | Deletion reduces | 8 | 30, 280 |
| | Vascular endothelial | receptors | 19 | Protein kinase | | |
| | growth factor receptor | and as such be used for treatment of | | domain | | |
| | 1 precursor | cancer, diabetes and Asthma. | | | | |
| | VGR1_HUMAN | Might also be used for Psoriasis. | | | | |
| 4 | KDR | Mostly the two first variants (which | Skipping exon | Truncates the protein | 9 | 31, 281 |
| | Vascular endothelial | might serve as a soluble/anchored decoy | 16(TM) | right before TM | | |
| | growth factor receptor | receptors for VEGF) | | (Soluble receptor) | | |
| | 2 precursor | might serve an antagonist to VEGF | 17 | Truncation deletes all | 10 | 32, 282 |
| | VGR2_HUMAN | receptors | | of the ICD | | |
| | | and as such be used for treatment of | 27 | Truncation doesn't | 11 | 33, 283 |
| | | cancer, diabetes and Asthma. | | affect domain | | |
| | | Might also be used for Psoriasis. | 28 | Truncation doesn't | 12 | 34, 284 |
| | | | | affect domain | | |
| | | | 29 | Truncation doesn't | 13 | 35, 285 |
| | | | | affect domain | | |
| 5 | ITAV | Might be used as Integrin antagonst: | Skipping exon | Truncation - Soluble | 14 | 36, 286 |
| | Integrin alpha-V | Would be used as anti-inflammatory | 11 | Receptor. | | |
| | precursor | (especially for GI), immunosuppressant, | 20 | Truncation - Soluble | 15 | 37,287 |
| | ITAV_Human | anti Asthma and anti cancer. | | Receptor. | | |
| | | | 21 | Deletion in heavy | 16 | 38, 288 |
| | | | | chain | | |
| | | | 25 | Deletion in heavy | 17 | 39, 289 |
| | | | | chain | | |
| 6 | MET | Soluble receptor might serve as MET | Skipping exon | Skipping TM - | 18 | 40, 290 |
| | (HGF receptor) | antagonist. | 12 | Soluble receoptor | | |
| | MET_Human | The variant might be involved in | | (evidence for | | |
| | | prevention of proliferation and | | extension) | | |
| | | prevention of metastases and cell | 14 | Deletion after TM - | 19 | 41, 291 |
| | | motility. It might be used for diabetes, | | may affect TM | | |
| | | skin conditions and for urological | 18 | Truncates most of the | 20 | 42, 292 |
| | | disorders. | | PK domain | | |
| 8 | FSHR | Soluble chain might serve as a | Skipping exon 7 | Deletion of LRR | 26 | 43, 293 |
| | Follicular stimulating | diagnostic marker for fertility and | 8 | Deletion of LRR | 27 | 44,294 |
| | hormone Receptor | menopausal disorders. | intron 7 retention | Truncation - Soluble | 28 | 45, 295 |
| | FSHR_Human | Both truncated forms could also be used | | extracellular Chain | | |
| | | as contraceptives. | Novel exon 8A | Truncation - Soluble | 29 | 46, 296 |
| | | Could also be used for mail fertility | (102 bp) | extracellular Chain - | | |
| | | diagnostic and treatment. | | A unique tail; | | |
| | | | | Validated by | | |
| | | | | sequencing | | |
| 9 | LSHR | Soluble chain might serve as a | Skipping exon 2 | Deletion LRR | 30 | 47, 297 |
| | Lutheizing hormone | diagnostic marker for fertility and | 3 | Deletion LRR | 31 | 48, 298 |
| | receptor | menopausal disorders. | 5 | Deletion LRR | 32 | 49, 299 |
| | LSHR_Human | Both truncated forms could also be used | 6 | Deletion LRR | 33 | 50, 300 |
| | | as contraceptives. | 7 | Deletion LRR | 34 | 51, 301 |
| | | Could also be used for mail fertility | 10 | Deletion LSHR | 35 | 52, 302 |
| | | diagnostic and treatment. | Intron 5 retention | Truncation - Soluble | 36 | 53, 303 |
| | | | | extracellular Chain | | |
| 10 | FGF11 | The soluble form might be used as | Skipping exon 2 - | In-frame Deletion of | 37 | 54, 304 |
| | Fibroblast growth | FGFR agonist/antagonist. Might be used | see FIG. 2d | 37 AA | | |
| | Factor | for treatment of Cancer, cardiovascular | | Validated by | | |
| | FGFB_HUMAN. | diseases and as a growth factor. | | seuqnecing | | |
| | | Deletion might cause Antagonist effect, | | | | |
| | | and thus be used for treatment of cancer | | | | |
| | | as well as diabetes and respiratory | | | | |
| | | conditions. | | | | |
| 11 | FGF12 | The soluble form might be used as | Skipping exon 2 | In-frame Deletion of | 38 | 55, 305 |
| | Fibroblast growth | FGFR agonist/antagonist. Might be used | long isdoform | 37 AA | | |
| | Factor | for treatment of Cancer, cardiovascular | | Soluble secreted form | | |
| | FGFC_HUMAN | diseases and as a growth factor. | Skipping exon 2 | In-frame Deletion of | 39 | 56, 306 |
| | | Deletion might cause Antagonist effect, | short isdoform | 37 AA | | |
| | | and thus be used for treatment of cancer | | Soluble secreted form | | |
| | | as well as diabetes and respiratory | | | | |
| | | conditions. | | | | |
| 12 | FGF13 | The soluble form might be used as | Skipping exon 2 | In-frame Deletion of | 40 | 57, 307 |
| | Fibroblast growth | FGFR agonist/antagonist. Might be used | long isdoform | 37 AA | | |
| | Factor | for treatment of Cancer, cardiovascular | | Soluble secreted form | | |
| | FGFD_HUMAN | diseases and as a growth factor. | Skipping exon 2 | In-frame Deletion of | 40a | 58, 308 |
| | | Deletion might cause Antagonist effect, | short isdoform | 37 AA | | |
| | | and thus be used for treatment of cancer | | Soluble secreted form | | |
| | | as well as diabetes and respiratory | Skipping exon 3 | Truncation of | 41 | 59, 309 |
| | | conditions. | long isdoform | protein. | | |
| | | | Skipping exon 3 | Truncation of | 41a | 60, 310 |
| | | | short isdoform | protein. | | |
| 13 | EFNA1 | Ephrin ligands and receptors have a | Skipping exon 3 | In-frame deletion - | 42 | 61, 311 |
| | Ephrin A | variety of roles in development and | | Reduction of Ephrin | | |
| | EFA1_human | cancer. | | domain | | |
| | | Variant's indication would be either | | | | |
| | | cause or prevent proliferation of certain | | | | |
| | | tissues - treatment of cancer as well as | | | | |
| | | wound healing and anti-inflammatory. | | | | |
| 14 | EFNA3 | Ephrin ligands and receptors have a | Skipping exon 3 | In-frame deletion - | 43 | 62, 312 |
| | Ephrin A | variety of roles in development and | | Reduction of Ephrin | | |
| | EFA3_human | cancer. | | domain. | | |
| | | Variant's indication would be either | 4 | In-frame deletion- | 44 | 63, 313 |
| | | cause or prevent proliferation of certain | | Redaction of Ephrin | | |
| | | tissues - treatment of cancer as well as | | domain. (supported | | |
| | | wound healing and anti-inflammatory. | | by 1 EST) | | |
| 15 | EFNA5 | Ephrin ligands and receptors have a | Skipping exon 3 - | In-frame deletion - | 45 | 64, 314 |
| | Ephrin A | variety of roles in development and | see | Reduction of Ephrin | | |
| | EFA5_human | cancer. | | domain. | | |
| | | Variant's indication would be either | 4 | In-frame deletion. | 46 | 65, 315 |
| | | cause or prevent proliferation of certain | | Reduction of Ephrin | | |
| | | tissues - treatment of cancer as well as | | domain. Validated by | | |
| | | wound healing and anti-inflammatory. | | sequencing | | |
| 16 | EFNB2 | Ephrin ligands and receptors have a | Skipping exon 2 | Truncation of most | 47 | 66, 316 |
| | Ephrin B | variety of roles in development and | | Ephrin domain. | | |
| | EFB2_Human | cancer. | | | | |
| | | Variant's indication would be either. | 3 | Reduction of Ephrin | 48 | 67, 317 |
| | | cause or prevent proliferation of certain | | domain. | | |
| | | tissues - treatment of cancer as well as | 4 | Reduction of | 49 | 68, 318 |
| | | wound healing and-anti-inflammatory. | | distance between | | |
| | | | | Ephrin domain and | | |
| | | | | TM | | |
| 17 | EPHA4 | Ephrin ligands and receptors have a | Skipping exon 2 | Truncation most of | 50 | 69, 319 |
| | Ephrin A receptor | variety of roles in development and | | the protein | | |
| | (Tyrosine Kinase) | cancer. | 3 | Truncation leaving | 51 | 70, 320 |
| | EPA4_Human | Variant's indication would be either | | LBD reduced and a | | |
| | | cause or prevent proliferation of certain | | long unique sequence | | |
| | | tissues - treatment of cancer as well as | 4 | Reducing distance | 52 | 71, 321 |
| | | wound healing and anti-inflammatory. | | LBD-FN III | | |
| | | | 12 | Truncation of SAM | 53 | 72, 322 |
| | | | | and most TK | | |
| 18 | EPHA5 | Ephrin ligands and receptors have a | Skipping exon 4 | Reducing distance | 54 | 73, 323 |
| | Ephrin A receptor | variety of roles in development and | | LBD-FN III | | |
| | (Tyrosine Kinase) | cancer. | | | | |
| | EPA5_Human | Variant's indication would be either | 5 | Abolishes the 1st FN | 55 | 74, 324 |
| | | cause or prevent proliferation of certain | | III | | |
| | | tissues - treatment of cancer as well as | 8 (TM) | Soluble ECD | 56 | 75, 325 |
| | | wound healing and anti-inflammatory. | | (Soluble receptor) | | |
| | | | | and a long unique | | |
| | | | | sequence | | |
| | | | 10 | Truncation of ICD | 57 | 76, 326 |
| | | | | (SAM and TK) | | |
| | | | 14 | Reducing Protein | 58 | 77, 327 |
| | | | | kinase domain | | |
| | | | 16 | Truncation of SAM | 59 | 78, 328 |
| | | | | and most Protein | | |
| | | | | kinase | | |
| | | | 17 | Reduces SAM | 60 | 79, 329 |
| | | | | domain | | |
| 19 | EPHA7 | Ephrin ligands and receptors have a | Skipping exon 10 | Deletion truncates | 61 | 80, 330 |
| | Ephrin A receptor | variety of roles in development and | | most of ICD | | |
| | (Tyrosine Kinase) | cancer. | 15 | Truncation of SAM | 62 | 81, 331 |
| | EPA7_Human | Variant's indication would be either | | and most of the | | |
| | | cause or prevent proliferation of certain | | Protein kinase. | | |
| | | tissues - treatment of cancer as well as | | | | |
| | | wound healing and anti-inflammatory. | | | | |
| 20 | EPHB1 | Ephrin ligands and receptors have a | Skipping exon 6 | Truncated Soluble | 63 | 82, 332 |
| | Ephrin B receptor | variety of roles in development and | | Receptor | | |
| | (Tyrosine Kinase) | cancer. | 8 (TM) | Truncation of ECD- | 64 | 83, 333 |
| | EPB1_Human | Variant's indication would be either | | Soluble Receptor; | | |
| | | cause or prevent proliferation of certain | | long Unique | | |
| | | tissues - treatment of cancer as well as | | sequence | | |
| | | wound healing and anti-inflammatory. | 10- see FIG. 2a | In-frame deletion | 65 | 84, 334 |
| | | | | Reduces Protein | | |
| | | | | kinase - Validated by | | |
| | | | | Sequencing | | |
| 21 | PTPRZ1 | Protein tyrosine phosphatase receotors | Skipping exon 7 | Truncation of most | 66 | 85, 335 |
| | Protein-tyrosine | have a variety of roles in development; | | protein domains | | |
| | phosphatase zeta | metabolism and cancer. Variant's | 11 | Truncation after 2^{nd} | 67 | 86, 336 |
| | PTPZ_Human | indication would be either cause or | | fibronectin | | |
| | | prevent proliferation of certain tissues - | 13 (TM)- | A soluble receptor - | 68 | 87, 337 |
| | | treatment of cancer as well as | see FIG. 2f | validated | | |
| | | cardiovascular disorders and diabetes | 15 | abolishing most of | 69 | 88, 338 |
| | | | | ICD Long Unique | | |
| | | | | sequence | | |
| | | | 16 | doesn't effect any | 70 | 89, 339 |
| | | | | domain | | |
| | | | 22 | abolishes 2nd PTP - | 71 | 90,340 |
| | | | | Long Unique | | |
| 22 | PTPRB | Protein tyrosine phosphatase receotors | Skipping exon 26 | Truncation abolishes | 72 | 91, 341 |
| | Protein-tyrosine | have a variety of roles in development, | | all ICD with a short | | |
| | phosphatase Beta | metabolism and cancer. Variant's | | unique sequence. | | |
| | PTPB_Human | indication would be either cause or | | | | |
| | | prevent proliferation of certain tissues - | | | | |
| | | treatment of cancer as well as | | | | |
| | | cardiovascular disorders and diabetes | | | | |
| 23 | KITLG | Agonist plays a role as antianaemic. | Skipping exon 8 | Truncating C-ter | 73 | 92, 342 |
| | KIT ligand: SCF/MGF | Secreted molecule might be a more | | including TM and | | |
| | SCF_Human | potent agonist for the receptor. | | ICD. Unique | | |
| | | Soluble form might also be used as an | | sequence might add | | |
| | | antagonist and thus prevent proliferation | | an alternative TM. | | |
| | | of blood cells in hematopoietic cancers. | | But may be soluble. | | |
| 24 | KIT | Agonist plays a role as antianaemic. | Skipping exon 8 | Truncation creates | 74 | 93, 343 |
| | KIT_Human | Soluble receptor might be used as an | | Soluble receptor | | |
| | | antagonist and thus prevent proliferation | 14 | Truncation reduces | 75 | 94, 344 |
| | | of blood cells in hematopoietic cancers. | | Protein Kinase | | |
| 25 | ErbB2 | Might serve as a diagnostic marker for | Skipping exon 6 | Truncation of most | 76 | 95, 345 |
| | Receptor Tyrosine | HER2 overexpressing cancer types. | | C-ter (leaving one L- | | |
| | Kinase | Might be used as an antagonist. | | domain and reduced | | |
| | ERB2_Human | | | furin-like domain) - | | |
| | | | | Soluble | | |
| 26 | ErbB3 | Since exon 15 and 18 skipping variants | Skipping exon 4 | Reducing distance L- | 77 | 96, 346 |
| | Receptor Tyrosine | encode soluble receptors which include | | domain - furin | | |
| | Kinase | the ligand binding domain, it is | 15 | Soluble ECD | 78 | 97, 347 |
| | ERB3_Human | suggested that such proteins may serve | | (reduced 2^{nd} furin) - | | |
| | | as antagonists for all EGFR family genes | | Soluble receptor | | |
| | | which undergo heterodimerization as | 18 | Deletion reduces | 79 | 98, 348 |
| | | part of their activation. | | Protein kinase | | |
| | | | | domain. | | |
| 27 | ErbB4 | Especially skipping exon 14 might serve | Skipping exon 14 | Soluble ECD | 80 | 99, 349 |
| | Receptor Tyrosine | as a good antagonist for all EGFR | | (reduced 2^{nd} furin) - | | |
| | Kinase | family genes. | | Soluble receptor | | |
| | ERB4_Human | Might serve as ERBB2 antagonist (also | 16 | Reducing 2^{nd} furin | 81 | 100, 350 |
| | | for EGFR, ERBB3 and ERBB4) | | like domain | | |
| 28 | NRG1 incl forms: | As many of the NRG1 isoforms serve as | HGR-α, HGR β1 | (Known in some | 82 | 101, 351 |
| | HGR-α, HGR-β1, | ErbB1/3/4 (EGFR family) ligands. | HGR β2 | isoforms, but not in | 83 | 102, 352 |
| | HGR-β2, | Most variants might be used as | HGR β3 | others): Deletion | 84 | 103, 353 |
| | HGR-β3, HGR-γ, | partial/full antagonists of these cancer | HGR γ | Reduces distance | 85 | 104, 354 |
| | HGR-GGF, NDF43 | related receptors | HGR-GGF, | between EGF - Ig | 86 | 105, 355 |
| | Neuregulin Variants | The indication might therefore be (in | NDF43 | like domain. | | |
| | NRG1_Human | some of the cases) for cancer treatment | Skipping exon 5 | Truncation abolishes | 87 | 106, 356 |
| | | and diagnosis. | HGR-β2, | NRG family domain. | 88 | 107, 357 |
| | | In some cases, some forms could serve | Skipping exon 8 | (Truncates HGR-β1 | | |
| | | as agonists, to enhance cell proliferation | HGR-β1 | to be like the shorter | 89 | 108, 358 |
| | | (especially for wound healing). | Skipping exon 9 | isoforms). | | |
| | | | HGR-α, | Truncation abolishes | 90 | 109, 359 |
| | | | HGR-β1, | NRG finnily domain. | | |
| | | | NDF43 | (Truncates HGR-β1 | | |
| | | | Skipping exon 7 | to be like the shorter | 91 | 110, 360 |
| | | | NDF43 | isoforms). | 92 | 111, 361 |
| | | | Skipping exon 12 | Truncation abolishes | 93 | 112, 362 |
| | | | HGR-β1 | NRG and EGF | 94 | 113, 363 |
| | | | Skipping exon 8 | domains | 95 | 114, 364 |
| | | | | (ln NDF43 adds a | | |
| | | | | long unique). | | |
| | | | | Truncates and adds a | | |
| | | | | long unique sequence | | |
| | | | | which is identical to | | |
| | | | | the HGR-β1 isoform, | | |
| | | | | and recreates the | | |
| | | | | NRG domain. | | |
| | | | | Reduces distance | | |
| | | | | between EGF and | | |
| | | | | NRG. | | |
| 29 | JAG1 | Has a known indication for | Skipping exon 10 | Deletion of 4th | 96 | 115, 365 |
| | Jagged-regulator of | atherosclerotic diseases. JAG1 | | EGF domain | | |
| | Angiogenesis | antagonist (especially. Soluble receptor) | 12 | Deletion of 5th & 6th | 97 | 116, 366 |
| | JAG1_Human | might serve in preventing/treating | | EGF domains | | |
| | | cardiovascular diseases and cancer. | 18 | Deletion of 12th | 98 | 117, 367 |
| | | | | EGF domain | | |
| | | | | (extention creates a | | |
| | | | | soluble receptor, but | | |
| | | | | is known) | | |
| | | | 22 | Truncation creates a | 99 | 118, 368 |
| | | | | soluble receptor with | | |
| | | | | a long unique | | |
| | | | | sequence. | | |
| 30 | NOTCH2 | NOTCH agonists are indicated for | Skipping exon 9 - | abolishes one EGF - | 100 | 119, 369 |
| | Neurogenic locus notch | AntiAsthma and immunosuppressants. | seeFIG. 2e | like repeat. | | |
| | homolog protein | Might also be diagnostic markers for | 12 | abolishes one EGF - | 101 | 120, 370 |
| | NTC2_Human | mental illnesses. | | like repeat. | | |
| 31 | NOTCH3 | NOTCH agonists are indicated for | Skipping exon 2 | Truncates entire | 102 | 121, 371 |
| | Neurogenic locus notch | AntiAstluna and immunosuppressants. | | protein leaving only | | |
| | homolog protein | Might also be diagnostic markers for | | SP with a long | | |
| | NTC3_Human | mental illnesses. | | different, unique, AA | | |
| | | | | sequence. | | |
| 32 | NOTCH4 | NOTCH agonists are indicated for | Skipping exon 8 | abolishes two EGF - | 103 | 122, 372 |
| | Neurogenic locus notch | AntoAsthma and immunosuppressants. | | like repeats | | |
| | homolog protein | Might also be diagnostic markers for | | | | |
| | NTC4_Human | mental illnesses. | | | | |
| 33 | NTRK2 | Agonist/partial agonist might play a role | Skipping exon | In-frame deletion, | 104 | 123, 373 |
| | BDNF/NT-3 growth | in CNS related diseases such as | 14 FIG. 2g | Doesn't affect a | | |
| | factor receptor | Parkinson, Alzheimer and other | | domain - Validated | | |
| | TRKB_HUMAN | disorders. As well as a memory | | by sequencing. | | |
| | | enhancer and neuroprotective. | | | | |
| | | Antagonist might also be a mental | | | | |
| | | treatment. | | | | |
| 34 | NTRK3 | Agonist/partial agonist might play a role | Skipping exon 5 | Deletion abolishes | 105 | 124, 374 |
| | NT-3 growth factor | in CNS related diseases such as | | two short LRRs | | |
| | receptor | Parkinson, Alzheimer and other | 16 | Truncation reduces | 106 | 125, 375 |
| | TRKC_HUMAN | disorders. As well as a memory | | the PK domain | | |
| | | enhancer and neuroprotective | | | | |
| | | Antagonist might also be a mental | | | | |
| | | treatment. | | | | |
| 35 | GFRA1 | Agonist might serve as a neuroprotective | Skipping exon 4 (3 | Reduces GDNF | 107 | 126, 376 |
| | RET ligand | agent. | in CDs) | receptor family | | |
| | GDNF receptor | Thus might have a role in preventing | | | | |
| | GDNR_HUMAN | Parkinson and other CNS related | | | | |
| | | disorders. | | | | |
| 36 | GFRA2 | Agonist might serve as a neuroprotective | Skipping exon 3 | Reduces GDNF | 108 | 127, 377 |
| | RET ligand | agent. | | receptor family | | |
| | GDNF receptor | Thus might have a role in preventing | | | | |
| | NRTR_Human | Parkinson and other CNS related | | | | |
| | | disorders. | | | | |
| 37 | IL16 - Long | Both agonist and antagonist might have | Skipping exon 5 | Truncates the | 109 | 128, 378 |
| | Interleukin 16 long | a role in treating cancer and | | protein, leaving no | | |
| | variant | inflammation, antagonist would be used | | domains | | |
| | IL16_human | for Asthma. | 18 (5 in shorter | Deletion reduces | 110 | 129, 379 |
| | | | isoform) | 3rd (1st) PDZ | | |
| | | | | domain | | |
| 38 | IGFBP4 | Might serve as an enhancer for Insulin | Skipping exon 3 | Deletion reduces | 111 | 130, 380 |
| | Insulin Growth factor | growth factor. Might thus have an affect | | Thyroglobulin type-1 | | |
| | binding protein | as a Growth hormone and on diseases | | repeat domain | | |
| | IBP4_Human | such as: | | | | |
| | | Osteoporosis and MS. | | | | |
| 39 | NRP1 | Much like VEGF and VEGFR genes, | Skipping exon 5 | Deletion reduces the | 112 | 131, 381 |
| | Neuropilin-1 precursor | indication for preventing angiogenesis | | CUB domain | | |
| | NRP1_HUMAN | (for treatment of cancer) and inducing | | | | |
| | | angiogenesis (for cardiovascular and | | | | |
| | | ischemia diseases). | | | | |
| 40 | FGF9 | The soluble form might be used as | Skipping exon 2 | Truncation reduces | 113 | 132, 382 |
| | Fibroblast growth | FGFR agonist/antagonist. Might be used | | FGF domain | | |
| | factor | for treatment of Cancer, cardiovascular | | (creating a unique | | |
| | FGF9_Human | diseases and as a growth factor. | | putative hydrophilic | | |
| | | Deletion might cause Antagonist effect, | | tail) | | |
| | | and thus be used for treatment of cancer | | | | |
| | | as well as diabetes and respiratory | | | | |
| | | conditions. | | | | |
| 41 | FGF10 | The soluble form might be used as | Skipping exon 2 | Truncation reduces | 114 | 133, 383 |
| | Fibroblast growth | FGFR agonist/antagonist. Might be used | | FGF domain | | |
| | factor | for treatment of Cancer, cardiovascular | | (creating a unique | | |
| | FGFA_Human | diseases and as a growth factor. | | putative hydrophilic | | |
| | | Deletion might cause Antagonist effect, | | tail) | | |
| | | and thus be used for treatment of cancer | | | | |
| | | as well as diabetes and respiratory | | | | |
| | | conditions. | | | | |
| 42 | FGF18 | The soluble form might be used as | Skipping exon 2 | Truncated protein | 115 | 134, 384 |
| | Fibroblast growth | FGFR agonist/antagonist. Might be used | 4 | Truncation reducing | 116 | 135, 385 |
| | factor | for treatment of Cancer, cardiovascular | | FGF domain | | |
| | FGFI_Human | diseases and as a growth factor. | | (creating a unique | | |
| | | Deletion might cause Antagonist effect, | | putative hydrophilic | | |
| | | and thus be used for treatment of cancer | | tail) | | |
| | | as well as diabetes and respiratory | | | | |
| | | conditions. | | | | |
| 43 | ANGPT1 | Agonist of Angiopoietin might serve for | Skipping exon 5 | Truncation of the | 117 | 136, 386 |
| | Angiopoietin-1 | therapy of cardiovascular diseases as | | Fibrinogen-C | | |
| | AGP1_HUMAN | well as cancer. | | terminal domain | | |
| | | | 6 | Deletion reduces | 118 | 137, 387 |
| | | | | Fibrinogen-C | | |
| | | | | terminal domain | | |
| | | | 8 (in long isoform) | Truncation reduces | 119 | 138, 388 |
| | | | | Fibrinogen-C | | |
| | | | | terminal domain | | |
| 45 | EDNRB | Antagonist would have a role in | Skipping exon 4 | reduction in the 7 | 128 | 139, 389 |
| | Endothelin B receptor | cardiovascular diseases. | | transmembrane | | |
| | ETBR_human | | | receptor (rhodopsin | | |
| | | | | family) domain | | |
| 46 | ECE1 | Antagonist would be useful in | Skipping exon 2 | Deletion would | 129 | 140, 390 |
| | Endothelin converting | respiratory diseases, it might have | | convert Signal | | |
| | Enzyme | diuretic effect and thus be used for | | Peptide to a Signal | | |
| | ECE1_HUMAN | hypertention and cardiovascular | | anchor. | | |
| | | diseases. | | | | |
| 47 | ECE2 | Antagonist would be useful in | Skipping exon 2 | Deletion would | 130 | 141, 391 |
| | Endothelin converting | respiratory diseases, it might have | | convert Signal | | |
| | Enzyme | diuretic effect and thus be used for | | Peptide to a Signal | | |
| | ECE2_HUMAN | hypertention and cardiovascular | | anchor. (Known) | | |
| | | diseases. | 8 | Deletion reduces | 131 | 142, 392 |
| | | | | M13 peptidase N | | |
| | | | 12 | Deletion reduces | 132 | 143, 393 |
| | | | | M13 peptidase N | | |
| | | | 13 | Deletion reduces | 133 | 144, 394 |
| | | | | M13 peptidase N | | |
| | | | 15 | Deletion reduces | 134 | 145, 395 |
| | | | | M13 peptidase C | | |
| 48 | ITGA2B | Might be used as Integrin antagonist: | Skipping exon 3 | Truncation abolishes | 135 | 146, 396 |
| | Integrin alpha-Iib | Indicated for cardiovascular diseases. | | most of the protein | | |
| | ITAB_Human | | | including most of | | |
| | | | | FG-GAP repeats (1 | | |
| | | | | EST skips exons 2-4) | | |
| 49 | MPL | Might be used as a diagnostic agent for | Skipping exon 2 | Truncation of most of | 136 | 147, 397 |
| | Thrombopoietin | hematological diseases, as well as | | the protein | | |
| | receptor | therapy as a growth factor and antiviral. | | | | |
| | TPOR_HUMAN | | | | | |
| 50 | CUL5 | Variants might be used as Vasopressin | Skipping exon 2 | Truncation reduces | 137 or 138 | 148 or |
| | Cullin homolog 5 | antagonists for treatment of Diabetes, | | the CULLIN domain | | 149/398 |
| | Vasopressin-activated | cardiovascular diseases (Diuretic for | 8 | Truncation reduces | 139 | 150, 399 |
| | calcium-mobilizing | hypertension) and as an antidepressant. | | the CULLIN domain | | |
| | receptor | | | | | |
| | VAC1_HUMAN | | | | | |
| 51 | HPA | As Agonist this protein might serve for | Skipping exon 10 | Truncation slightly | 140 | 151, 400 |
| | Heparanase | treatment of Cystic Fibrosis. | | reduces Glycosyl | | |
| | Q9Y251 | As antagonist it is indicated for Cancer | | hydrolase domain. | | |
| | | (anti metastatic), cardiovascular and MS. | | | | |
| 52 | HPSE2 | As Agonist this protein might serve for | Skipping 5 | Truncation reduces | 141 | 152, 401 |
| | Heparanase 2 | treatment of Cystic Fibrosis | | Glycosyl hydrolase | | |
| | Q8WWQ2 | As antagonist it is indicated for Cancer | | domain | | |
| | Q8WWQ1 | (anti metastatic), cardiovascular and MS. | 6 | Deletion reduces | 142 | 153, 402 |
| | | | | Glycosyl hydrolase | | |
| | | | | domain | | |
| | | | 7 | Truncation reduces | 143 | 154, 403 |
| | | | | Glycosyl hydrolase | | |
| | | | | domain | | |
| | | | 8 | Truncation reduces | 144 | 155, 404 |
| | | | | Glycosyl hydrolase | | |
| | | | | domain | | |
| | | | 9 | Truncation reduces | 145 | 156, 405 |
| | | | | Glycosyl hydrolase | | |
| | | | | domain | | |
| | | | 10 | Truncation reduces | 146 | 157, 406 |
| | | | | Glycosyl hydrolase | | |
| | | | | domain | | |
| | | | 11 | Deletion doesn't | 147 | 158, 407 |
| | | | | affect Glycosyl | | |
| | | | | hydrolase | | |
| 55 | MME | As an antagonist, these variant might be | Skipping exon 4 | Deletion reduces N- | 150 | 159, 408 |
| | Neutral endopeptidase | used for treatment of Hypertension (a | | ter M13 peptidase | | |
| | (Enkephalinase) | diuretic agent), as a cardiostimulant, as | 7 | Truncation reduces | 151 | 160, 409 |
| | NEP_HUMAN | antidepressant and for treatment of | | N-ter M13 peptidase | | |
| | | Migraine. | | and abolishes C-ter | | |
| | | | | M13 peptidase | | |
| | | | 9 | Deletion reduces N- | 152 | 161, 410 |
| | | | | ter M13 peptidase | | |
| | | | 11 | Truncation reduces | 153 | 162, 411 |
| | | | | N-ter M13 peptidase | | |
| | | | | and abolishes C-ter | | |
| | | | | M13 peptidase. | | |
| | | | 12 | Truncation reduces | 154 | 163, 412 |
| | | | | N-ter M13 peptidase | | |
| | | | | and abolishes C-ter | | |
| | | | | M13 peptidase. | | |
| | | | 16 | Truncation abolishes | 155 | 164, 413 |
| | | | | C-terminal M13 | | |
| | | | | peptidase. | | |
| 56 | APBB1 | Antagonist to the amiloid 4a might be | Skipping exon 3 | Truncation abolishes | 156 | 165, 414 |
| | Alzheimer's disease | used as a neuroprotective agent, to help | | most of the protein | | |
| | amyloid A4 binding | prevent/treat Alzheimer, Parkinson and | | (Extended EST) | | |
| | protein | other neurodegradative diseases. I might | 7 | Deletion reduces 1st | 157 | 166, 415 |
| | ABB1_HUMAN | also be used for hypertention, and as an | | PID domain | | |
| | | anti-inflammatory agent. | 9 | Deletion reduces 1st | 158 | 167, 416 |
| | | | | PID domain | | |
| | | | | (Extended EST) | | |
| | | | 10 | Truncation abolishes | 159 | 168, 417 |
| | | | | 2^{nd} PID reduces 1st | | |
| | | | | PID Domain | | |
| | | | 12 | Truncation abolishes. | 160 | 169, 418 |
| | | | | 2^{nd} PID domain - | | |
| | | | | Adds a Cys rich | | |
| | | | | unique sequence. | | |
| 57 | GDNF | Anti Parkinson. | Skipping exon 2 | Unknown as exon 2 | | 170, 419 |
| | GDNF_HUMAN | | | is last. | | |
| 58 | SCTR | Agonist has haemostatic affects | Skipping exon 10 | Truncation reduces 7 | 162 | 171, 420 |
| | Secretin receptor | (clotting) and some neurological | | transmembrane | | |
| | SCRC_HUMAN | functions. | | receptor (Secretin | | |
| | | | | family) (eliminates | | |
| | | | | last two TM) | | |
| 59 | RSU1 | Might have anti-cancer affect. | Skipping exon 6 | Truncation eliminates | 163 | 172, 421 |
| | Ras suppressor protein 1 | Might serve as a diagnostic marker. | | 3/7 LRR repeats. | | |
| | RSU1_human | | | | | |
| 60 | IL18R | Antagonist has an anti-inflammatory | Skipping exon 9 | Deletion abolishes all | 164 | 173, 422 |
| | Interleukine 18 | effect, might be useful for arthritis and | | of TIR domain | | |
| | receptor | MS. | | (NFkB activating) | | |
| | IR18_Human | | | | | |
| 61 | TGFB2 | Might only be used as a diagnostic | Skipping exon 5 | Truncation abolishes | 165 | 174, 423 |
| | Transforming growth | marker as the variant is basically the | | TGFB peptide and | | |
| | factor beta 2 | Propeptide, Might be used for cancer or | | slightly reduces propeptide. | | |
| | TGF2_Human | respiratory related diseases. | | | | |
| 62 | TIAF1 | An agonist might be used for anti cancer | Skipping exon 11 | Deletion (4AA) | 166 | 175, 424 |
| | (TGFB1-induced anti- | or as an immunosuppressant. | | reduces Myosin head | | |
| | apoptotic factor 1) | An antagonist mught be used for cancer, | | (motor domain) | | |
| | TIAF_HUMAN | Asthma, MS, Cardiovascular diseases | 25 | Deletion doesn't | 167 | 176, 425 |
| | | and respiratory | | affect a domain. | | |
| | | | 34 | Deletion doesn't | 168 | 177, 426 |
| | | | | affect a domain. | | |
| 63 | IL1RAP | Many indications associated with IL1 | Skipping exon 11 | Deletion reduces TIR | 169 | 178, 427 |
| | IL-1 receptor accessory | and IL1 family proteins | | domain | | |
| | protein | The most prevalent indication is as an | | | | |
| | O14915 | antagonist for anti-inflammatory | | | | |
| | | pusposes (Such as MS, Diabetes, Cancer | | | | |
| | | and Arthritis). As both agonist and | | | | |
| | | antagonist might be good for cancer, | | | | |
| | | cardiovascular diseases and | | | | |
| | | antiinflammatory. | | | | |
| 64 | IL1RAPL1 | Many indications associated with IL1 | Skipping exon 4 | Truncation | 170 | 179, 428 |
| | IL-1 receptor accessory | and IL1 family proteins. | | abolishes most of the | | |
| | protein like 1 | The most prevalent indication is as an | | protein | | |
| | Q9UJ53 | antagonist for anti-inflammatory | 5 | Truncation | 171 | 180, 429 |
| | | purposes (Such as MS, Diabetes, Cancer | | abolishes most of the | | |
| | | and Arthritis). As both agonist and | | protein | | |
| | | antagonist, might be good for cancer, | 6 | Deletion reduces | 172 | 181, 430 |
| | | cardiovascular diseases and | | distance: Ig2-3 | | |
| | | antiinflammatory. | | | | |
| | | | 7 | Truncation bolishes | 173 | 182, 431 |
| | | | | ICD and 1 Ig | | |
| | | | | (Soluble receptor) | | |
| | | | 8 | Truncation creates | 174 | 183, 432 |
| | | | | a soluble receptor | | |
| | | | | with 3 Ig-like | | |
| | | | | domains | | |
| 65 | IL1RAPL2 | Many indications associated with IL1 | Skipping exon 4 | Truncation | 175 | 184, 433 |
| | IL-1 receptor accessory | and IL1 family proteins. | | abolishes most of the | | |
| | protein like 2 | The most prevalent indication is as an | | protein. | | |
| | Q9NP60 | antagonist for anti-inflammatory | 5 | Truncation | 176 | 185, 434 |
| | | purposes (Such as MS, Diabetes, Cancer | | abolishes most of the | | |
| | | and Arthritis). As both agonist and | | protein | | |
| | | antagonist might be good for cancer, | 6 | Deletion reduces | 177 | 186, 435 |
| | | cardiovascular diseases and | | distance: Ig2-3 | | |
| | | antiinflammatory. | 7 | Truncation bolishes | 178 | 187, 436 |
| | | | | ICD and 1 Ig | | |
| | | | | (Soluble receptor) | | |
| | | | 8 | Truncation creates a | 179 | 188, 437 |
| | | | | soluble receptor with | | |
| | | | | 3 Ig-like domains | | |
| 66 | THBS1 | Can be used as an anticancer treatment | Skipping exon 4 | Truncation | 180 | 189, 438 |
| | Thrombospondin 1 | both as antagonist and as agonist. | | abolishes all domains | | |
| | precursor | Antagonist is useful against, | | but Thrombospondin | | |
| | TSP1_HUMAN | proliferation, and agonist as an anti- | | N-terminal-like | | |
| | | inflammatory. | | domain (reduced) | | |
| | | | 7 | Truncation | 181 | 190, 439 |
| | | | | abolishes all TSP and | | |
| | | | | EGF domains leaving | | |
| | | | | only the | | |
| | | | 9 | Thrombospondin N- | 182 | 191, 440 |
| | | | | terminal-like domain | | |
| | | | | and a reduced VWC. | | |
| | | | | A very long Unique | | |
| | | | | tail. | | |
| | | | 12 | Deletion abolishes | 183 | 192, 441 |
| | | | | 1st TSP1 repeat. | | |
| | | | | Deletion doesn't | | |
| | | | | affect a domain. | | |
| 67 | THBS4 | Can be used as an anticancer treatment | Skipping exon 15 | Truncation abolishes | 184 | 193, 442 |
| | Thrombospondin 4 | both as antagonist and as agonist. | | 6 TSP3 domain and | | |
| | precursor | Antagonist is useful against | | the entireTSO - C | | |
| | TSP4_HUMAN | proliferation, and agonist as an anti- | | domain. No Unique! | | |
| | | inflammatory, | | | | |
| 68 | PROS1 | Indication for blood clotting - might | Skipping exon 3 | Truncation of most | 185 | 194, 443 |
| | Vitamin K-dependent | serve as an antagonist for Fibrinogen, | | protein. Leaving only | | |
| | protein S precursor | and as a stimulant for TPA (anti | | SP and 77 AA as | | |
| | PRTS_HUMAN | clotting). | | reduced GLA | | |
| | | | | Domain. | | |
| 69 | VWF | Could serve as agonist and/or antagonist | Skipping exon 8 | Deletion abolishes | 186 | 195, 444 |
| | Von Willebrand factor | for clotting factor VIII. As such might | | the 1st TIL domain. | | |
| | precursor | be used for hematodynamic indications, | 13 | Trunaction abolishes | 187 | 196, 445 |
| | VWF_HUMAN | including anti-thrombosis and anti- | | all C-terminus of the | | |
| | | bleeding. | | protein including all | | |
| | | | | domains but two | | |
| | | | | WVD domains and | | |
| | | | | oneTIL | | |
| | | | 29 | Deletion doesn't | 188 | 197, 446 |
| | | | | affect a domain. | | |
| 70 | M17S2 Ovarian | A diagnostic marker for mostly Ovarian | Skipping exon 14 | Truncation doesn't | 189 | 198, 447 |
| | carcinoma antigen | cancer. The variants could be indicated | | affect a domain. | | |
| | CA125 | for other types of cancer. | 15 | Deletion doesn't | 190 | 199, 448 |
| | M172_HUMAN | | | affect a domain. | | |
| | | | 20 | No Unique | 191 | 200, 449 |

### Example 4

### Finding Novel Proteins Using Cross Species Homology

[0691] Mouse expressed sequences were aligned to the human genome. Alignments were filtered by a minimal length criterion, and remaining alignments were used to generate “corrected” expressed sequences (by concatenating the fragments of human genomic sequence to which a mouse expressed sequence aligned). These corrected sequences were clustered together with human expressed sequences and the resulting clusters were assembled and subjected to a process of transcript prediction. Within the set of resulting transcripts, transcripts were identified, which cannot be predicted using only human expressed sequences.

[0692] Specifically, the following method was performed:

[0693] 1. Human, mouse and rat ESTs and cDNAs were obtained from NCBI GenBank versions 136 (Jun. 15, 2003) ftp://ftp.ncbi.nih.gov/genbank/release.notes/gb136.release.notes) and NCBI genome assembly of April 2003. Using the LEADS clustering and assembly system as described in Sorek et al. (2002), the expressed sequences were cleaned from repeats, vectors and immunoglobulins, and then aligned to the NCBI human genome reference build 33 (April 2003). The best genomic location was chosen for each human expressed sequence. The human sequences were clustered by genome location. Some clusters were separated in cases of suspected over-clustering or overlapping antisense clusters.

[0694] 2. Mouse and rat expressed sequences may have more than one alignment to the human genome. All alignments were considered except those shorter than 50 base pairs and unspliced. For further analysis only alignments that overlap human clusters were selected.

[0695] 3. Each mouse or rat alignment was replaced by the corresponding human DNA sequence, such that problems of low id entity alignments do not interfere with the analysis.

[0696] 4. Human expressed sequences were grouped in each cluster with all the mouse/rat-originated sequences overlapping it. These groups were then assembled to form new hybrid clusters, taking into account alternative splicing.

[0697] 5. A list of reliable transcripts was compiled for each of the clusters, filtering suspected intron contaminations and giving preference to canonical splice signals.

[0698] 6. Alternative splicing events that are supported by non-human sequences only were searched. A list of the transcripts fat contains these events was then compiled.

[0699] 7. Proteins for these transcripts were predicted.

### Example 5

### Annotation of Computationally Identified Alternatively Spliced Sequences

[0700] Newly uncovered naturally occurring transcripts were annotated using the GeneCarta (Compugen, Tel-Aviv, Israel) platform. The GeneCarta platform includes a rich pool of annotations, sequence information (particularly of spliced sequences), chromosomal information, alignments, and additional information such as SNPs, gene ontology terms, expression profiles, functional analyses, detailed domain structures, known and predicted proteins and detailed homology reports.

[0701] Brief description of the methodology used to obtain annotative sequence information is summarized infra (for a detailed description see U.S. patent application Ser. No. 10/426,002, filed on Apr. 30, 2003 and owned in common with the present application, hereby incorporated by reference as if fully set forth herein).

[0702] The ontological annotation approach—An ontology refers to the body of knowledge in a specific knowledge domain or discipline such as molecular biology, microbiology, immunology, virology, plant sciences, pharmaceutical chemistry, medicine, neurology, endocrinology, genetics, ecology, genomics, proteomics, cheminformatics pharmacogenomics, bioinformatics, computer sciences, statistics, mathematics, chemistry, physics and artificial intelligence.

[0703] An ontology includes domain-specific concepts—referred to, herein, as sub-ontologies. A sub-ontology may be classified into smaller and narrower categories. The ontological annotation approach is effected as follows.

[0704] First, biomolecular (i.e., polynucleotide or polypeptide) sequences are computationally clustered according to a progressive homology range, thereby generating a plurality of clusters each being of a predetermined homology of the homology range.

[0705] Progressive homology is used to identify meaningful homologies among biomolecular sequences and to thereby assign new ontological annotations to sequences, which share requisite levels of homologies. Essentially, a biomolecular sequence is assigned to a specific cluster if displays a predetermined homology to at least one member of the cluster (i.e., single linkage). A “progressive homology range” refers to a range of homology thresholds, which progress via predetermined increments from a low homology level (e.g. 35%) to a high homology level (e.g. 99%).

[0706] Following generation of clusters, one or more ontologies are assigned to each cluster. Ontologies are derived from an annotation preassociated with at least one biomolecular sequence of each cluster; and/or generated by analyzing (e.g., text-mining) at least one biomolecular sequence of each cluster thereby annotating biomolecular sequences.

[0707] Sequence annotations obtained using the above-described methodologies and other approaches are disclosed in a data table in the file AnnotationForPatent.txt of the enclosed CD-ROM 1.

### Example 6

### Description of Data

[0708] Following is a description of the data table in “AnnotationForPatent.txt” file, on the attached CD-ROM1. The data table shows a collection of annotations for biomolecular sequences, which were identified according to the teachings of the present invention using transcript data based on GenBank versions Genbank version 136 (Jun. 15, 2003 ftp://ftp.ncbi.nih.gov/genbank/release.notes/gb136.release.notes.

[0709] Each feature in the data table is identified by “#”.

[0710] The sequences in this patent application are additional information to the Gencarta contigs. Therefore, all annotations that re in terms of Gencarta contigs were also assigned to the sequences in this patent that are derived from these contigs. Also, annotations that are applied by comparing proteins resulting from the same contig were adapted by comparing the sequences in this patent to the proteins from the originals Gencarta contig.

[0711] #INDICATION—This field designates the indications and therapies that the polypeptide of the present invention can be utilized for. The indications state the disorders/disease that the polypeptide can be used for and the therapy is the postulated mode of action of the polypeptide for the indication. For example, an indication can be “Cancer, general” while the therapy will be “Anticancer”. Each Gencarta contig was assigned a SWISSPROT and/or TremB1 human protein accession as described in section “Assignment of Swissprot/TremB1 accessions to Gencarta contigs” hereinbelow. The information contained in this field is the indication concatenated to the therapies that were accumulated for the SWISSPROT and/or TremB1 human protein from drug databases, such as PharmaProject (PJB Publications Ltd 2003 http://www.pjbpubs.com/cms.asp?pageid=340) and public databases, such as LocusLink (http://www.genelynx.org/cgi-bin/resource?res=locuslink) and Swissprot (http://www.ebi.ac.uk/swissprot/index.html). The field may comprise more than one term wherein a “,” separates each adjacent terms.

[0712] Example—#INDICATION Alopecia, general; Antianginal; Anticancer, immunological; Anticancer, other; Atherosclerosis; Buerger's syndrome; Cancer, general; Cancer, head and neck; Cancer, renal; Cardiovascular; Cirrhosis, hepatic; Cognition enhancer; Dermatological; Fibrosis, pulmonary; Gene therapy; Hepatic dysfunction; general Hepatoprotective; Hypolipaemic/Antiatherosclerosis; Infarction, cerebral; Neuroprotective; Ophthalmological; Peripheral vascular disease; Radio/chemoprotective; Recombinant growth factor; Respiratory; Retinopathy, diabetic; Symptomatic antidiabetic; Urological;

[0713] Assignment of Swissprot/TremB1 accessions to Gencarta contigs—Gencarta contigs were assigned a Swissprot/TremB1 human accession as follows. Swissprot/TremB1 data were parsed and for each Swissprot/TremB1 accession (excluding Swissprot/TremB1 that are annotated as partial or fragment proteins) cross-references to EMBL and Genbank were parsed. The alignment quality of the Swissprot/TremB1 protein to their assigned mRNA sequences was checked by frame+p2n alignment analysis. A good alignment was considered as heving the following properties:

[0714] (i) For partial mRNAs (those that in the mRNA description have the phrase “partial cds” or annotated as “3”, or “5”)—an overall identity of 97% coverage of 80% of the Swissprot/TremB1 protein.

[0715] (ii) All the rest were considered as full coding RNAs an for them overall identity of 97% identity and coverage of the Swissprot/TremB1 protein of over 95%.

[0716] The mRNAs were searched in the LEADS database for their corresponding contigs, and the contigs that included these mRNA sequences were assigned the Swissprot/TremB1 accession.

[0717] #PHARM—This field indicates possible pharmacological activities of the % polypeptide. Each Gencarta polypeptide was assigned a SWISSPROT and/or TremB1 human protein accession, as described above. The information contained in this field is the proposed pharmacological activity that was accumulated for the SWISSPROT and/or TremB1 human protein from drug databases such as PharmaProject (PJB Publications Ltd 2003 http://www.pjbpubs.com/cms.asp?pageid=340) and public databases, such as LocusLink and Swissprot. Note that in some cases this field can include opposite terms in cases where the protein can have contradicting activities—such as:

[0718] (i) Stimulant—inhibitor

[0719] (ii) Agonist—antagonist

[0720] (iii) Activator—inhibitor

[0721] (iv) Immunosuppressant—Immunostimulant

[0722] In these cases the pharmacology was indicated as “modulator”.

[0723] As used herein the term “modulator” refers to a molecule which inhibits (i.e., antagonist, inhibitor, suppressor) or activates (i.e., agonist, stimulant, activator) a downstream molecule to thereby modulate its activity.

[0724] For example, if the predicted polypeptide has potential agonistic/antagonistic effects (e.g. Fibroblast growth factor agonist and Fibroblast growth factor antagonist) then the annotation for this code will be “Fibroblast growth factor modulator”.

[0725] A documentated example for such contradicing activities has been described for the soluble tumor necrosis factor receptors [Mohler et al., J. Immunology 151, 1548-1561]. Essentially, Mohler and co-workers showed that soluble receptor can act both as a carrier of TNF (i.e., agonistic effect) and as an antagonist of TNF activity.

[0726] #THERAPEUTIC_PROTEIN—This field predicts a therapeutic role for a protein represented by the contig. A contig was assigned this field if there was information in the drug database or the public databases (e.g., described hereinabove) that this protein, or part thereof, is used or can be used as a drug. This field is accompanied by the swissprot accession of the therapeutic protein which this contig most likely represents. Example: #THERAPEUTIC_PROTEIN UROK_HUMAN

[0727] #DN represents information pertaining to transcripts, which contain altered functional interpro domains (further described hereinabove). The Interpro domain is either lacking in this protein (as compared to another expression product of the gene) or its score is decreased (i.e., includes sequence alteration within the domain when compared to another expression product of the gene). This field lists the description of the functional domain(s), which is altered in the respective splice variants.

[0728] As used herein the phrase “functional domain” refers to a region of a biomolecular sequence, which displays a particular function. This function may give rise to a biological, chemical, or physiological consequence which may be reversible or irreversible and which may include protein-protein interactions (e.g., binding interactions) involving the functional domain, a change in the conformation or a transformation into a different chemical state of the functional domain or of molecules acted upon by the functional domain, the transduction of an intracellular or intercellular signal, the regulation of gene or protein expression the regulation of cell growth or death, or the activation or inhibition of an immune response.

[0729] Method: the proteins were compared to the proteins in the relevant Gencarta contig by BLASTP analysis against each other. All proteins were also analysed by Interpro domain analysis software (Interpro default parameters, the analyses that were run are HMMPfam, HMMSmart, ProfileScan, FprintScan, and BlastProdom). Each pair of proteins that shared at least 20% coverage of one or the other with an identity of at least 80% were analysed by domain comparison. If the proteins share a common domain (same domain accession) and in one of the proteins this domain has a decreased score (escore of 20 magnitude for HMMPfam, HMMSmart, BlastProdom, FprintScan or Pscore difference of ProfileScan of 5), or lacking the domain contained in another protein in the same contig, the protein with the reduced score or without the domains annotated as having lost this interpro domain. This lack of domain can have a functional meaning in which the protein lacking it (or having some part of it missing) can either gain a function or lose a function (e.g., acting, at times, as dominant negative inhibitor of the respective protein). Interpro domains, which have no functional attributes, were omitted from this analysis. The domains that were omitted are:

[0730] IPR000694 Proline-rich region

[0731] IPR001611 Leucine-rich repeat

[0732] IPR001893 Cysteine rich repeat

[0733] IPR000372 Cysteine-rich flanking region, N-terminal

[0734] IPR000483 Cysteine-rich flanking region, C-terminal

[0735] IPR003591 Leucine-rich repeat, typical subtype

[0736] IPR003885 Leucine-rich repeat, cysteine-containing type

[0737] IPR006461 Uncharacterized Cys-rich domain

[0738] IPR006553 Leucine-rich repeat, cysteine-containing subtype

[0739] IPR007089 Leucine-rich repeat, cysteine-containing

[0740] The results of this analysis are denoted in terms of the Interpro domain that is missing or altered in the protein. Example: #DN IPR002110 Ankyrin.

[0741] A documented example is in an article describing two splice variant forms of guanylyl cyclase-B receptor (Tamura N and Garbers D L, J Biol Chem. 2003 Dec. 5; 278(49):48880-9. Epub 2003 Sep. 26). One variant of this receptor has a 25 amino acid deletion in the kinase homology domain and therefore it binds the ligand but fails to activate the cyclase. The other variant includes part of the extracellular binding domain and hence it fails to bind the ligand. Both variants, when co-expressed with the wild-type receptor act as dominant negative isoforms.

[0742] #SECRETED_FORM_OF_MEMBRANAL_PROTEINS_BY_PROLOC—This field indicates if the indicated protein is a secreted form of a membranal protein. Method: the proteins were compared to the proteins in the relevant Gencarta by BLASTP analysis against each other. The Proloc algorithm was applied to all the proteins. Each pair of proteins that shared at least 20% coverage of one or the other with an identity of at least 80% was further examined. A protein was considered a soluble form of a membranal protein (i.e., cognate protein) if it was shown to be a secreted protein (as further described below) while the cognate partner was a membranal protein.

[0743] A protein was considered secreted of the following properties.

[0744] (i) Proloc's highest subcellular localization prediction is EXTRACELLULAR.

[0745] (ii) Proloc's prediction of a signal peptide sequence is more reliable than the prediction of a lack of signal peptide sequence. Furthermore, no transmembrane regions are predicted in the non N-terminus part of the protein (following 30 N-terminal amino acids)

[0746] (iii) Proloc's prediction of only one transmembrane domain, which is localized to the N-terminus part of the protein (in a region less than the first 30 amino acids)

[0747] The cognate protein was considered to be an membranal protein if it obeyed at least one of the following rules:

[0748] (i) Proloc's highest subcellular localization prediction is either CELL_INTEGRAL_MEMBRANE, CELL_MEMBRANE E_ANCHORI, or CELL_MEMBRANE_ANCHORII.

[0749] (ii) Proloc's prediction of at least one transmembrane domain which is not in the N-terminus part of the protein (in a region greater than the first 30 amino acids)

[0750] The header in this method will be

[0751] #SECRETED_FORM_OF_MEMBRANNEL_PROTEINS_BY_PROLOC.

[0752] Example:

[0753] #SECRETED_FORM_OF_MEMBRANNEL_PROTEINS_BY_PROLOC

[0754] Example: AA290625 P2 #SECRETED_FORM_OF_MEMBRANNEL_PROTEINS

[0755] #MEMBRANE FORM_OF_SOLUBLE_PROTEINS_BY_PROLOC_—This fields denotes if the indicated protein is a membranal form of a secreted protein.

[0756] Method: the proteins were compared to the proteins in the relevant Gencarta by BLASTP analysis against each other. The Proloc algorithm was applied to all the proteins. Each pair of proteins that shared at least 20% coverage with an identity of at least 80% was further examined. A protein was considered a membranal form of a secreted protein if it was shown to be (i.e., annotated) a membranal protein and they other protein it was compared to (i.e., cognate) was a secreted protein.

[0757] A protein is annotated membranal if is had at least one of the following properties:

[0758] (i) Proloc's highest subcellular localization prediction is either CELL_INTEGRAL_MEMBRANE, CELL_MEMBRANE_ANCHORI, or CELL_MEMBRANE_ANCHORII.

[0759] (ii) Proloc's prediction of at least one transmembrane domain which is not in the N-terminus part of the protein (in a region greater than the first N-terminal 30 amino acids)

[0760] The cognate protein is considered secreted if it obeyed at least one of the following rules:

[0761] (i) Proloc's highest subcellular localization prediction is EXTRACELLULAR.

[0762] (ii) Proloc's prediction of the existence of a signal peptide sequence is more reliable than the prediction of a lack of signal peptide sequence and no transmembrane regions are predicted in the non N-terminus part of the protein (after its N-terminal 30 amino acids)

[0763] (iii) Proloc's prediction of only one transmembrane domain which is in the N-terminus part of the protein (in a region less than the N-terminal 30

[0764] The annotation will be in the form of this header, example:

[0765] AA176800_P7 #MEMBRANE_FORM_OF_SOLUBLE_PROTEINS_BY PROLOC.

[0766] GO annotations were predicted as described in “The ontological annotation approach” section hereinabove. Additions to the GO prediction, other than the GO engine will be described below. These additions are to the cellular component attribute and biological process.

[0767] Functional annotations of transcripts based on Gene Ontology (GO) are indicated by the following format.

[0768] “#GO_P”, annotations related to Biological Process,

[0769] “#GO_F”, annotations related to Molecular Function, and

[0770] “#GO_C”, annotations related to Cellular Component.

[0771] Proloc was used for protein subcellular localization prediction that assigns GO cellular component annotation to the protein. The localization terms were assigned GO entries.

[0772] For this assignment two main approaches were used: (i) the presence of known extracellular domain/s in a protein (as appears in Table 4); (ii) calculating putative transmembrane segments, if any, in the protein and calculating 2 p-values for the existence of a signal peptide. The latest is done by a search for a signal peptide at the N-terminal sequence of the protein generating a score. Running the program on real signal peptides and on N-terminal protein sequences that lack a signal peptide resulted in 2 score distributions the first is the score distribution of the real signal peptides, and the second is the score distribution of the N-terminal protein sequences that lack the signal peptide. Given a new, protein, ProLoc calculates its score and outputs the percentage of the scores that are higher than the current score, in the first distribution, as a first p-value (lower p-values mean more reliable signal peptide prediction) and the percentage of the scores that are lower than the current score, in the second distribution, as a second p-value (lower p-values mean more reliable non signal peptide prediction).

[0773] Assignment of an extracellular localization (GO_Acc 5576 GO_Desc extracellular) was also based, on Interpro domains. A list of Interpro domains that characterize secreted proteins was compiled. A Gencarta protein that had a hit to at least one of these domains was annotated with an extracellular GO annotation. The list of secreted Interpro domains is depicted in Table 4.

TABLE 4
List of Interpro Domains of Secreted Proteins

| | |
|---|---|
| IPR000874 | Bombesin-like peptide |
| IPR001693 | Calcitonin-like |
| IPR001651 | Gastrin/cholecystokinin peptide hormone |
| IPR000532 | Glucagon/GIP/secretin/VIP |
| IPR001545 | Gonadotropin, beta chain |
| IPR004825 | Insulin/IGF/relaxin |
| IPR000663 | Natriuretic peptide |
| IPR001955 | Pancreatic hormone |
| IPR001400 | Somatotropin hormone |
| IPR002040 | Tachykinin/Neurokinin |
| IPR006081 | Alpha defensin |
| IPR001928 | Endothelin-like toxin |
| IPR001415 | Parathyroid hormone |
| IPR001400 | Somatotropin hormone |
| IPR001990 | Chromogranin/secretogranin |
| IPR001819 | Chromogranin A/B |
| IPR002012 | Gonadotropin-releasing hormone |
| IPR001152 | Thymosin beta-4 |
| IPR000187 | Corticotropin-releasing factor, CRF |
| IPR001545 | Gonadotropin, beta chain |
| IPR000476 | Glycoprotein hormones alpha chain |
| IPR000476 | Glycoprotein hormones alpha chain |
| IPR001323 | Erythropoietin/thrombopoeitin |
| IPR001894 | Cathelicidin |
| IPR001894 | Cathelicidin |
| IPR001483 | Urotensin II |
| IPR006024 | Opioid neuropeptide precursor |
| IPR000020 | Anaphylatoxin/fibulin |
| IPR000074 | Apolipoprotein A1/A4/E |
| IPR001073 | Complement C1q protein |
| IPR000117 | Kappa casein |
| IPR001588 | Casein, alpha/beta |
| IPR001855 | Beta defensin |
| IPR001651 | Gastrin/cholecystokinin peptide hormone |
| IPR000867 | Insulin-like growth factor-binding protein, IGFBP |
| IPR001811 | Small chemokine, interleukin-8 like |
| IPR004825 | Insulin/IGF/relaxin |
| IPR002350 | Serine protease inhibitor, Kazal type |
| IPR000001 | Kringle |
| IPR002072 | Nerve growth factor |
| IPR001839 | Transforming growth factor beta (TGFb) |
| IPR001111 | Transforming growth factor beta (TGFb), N-terminal |
| IPR001820 | Tissue inhibitor of metalloproteinase |
| IPR000264 | Serum albumin family |
| IPR005817 | Wnt superfamily |

[0774] For each category the following features are optionally addressed:

[0775] “#GO_Acc” represents the accession number of the assigned GO entry, corresponding to the following “#GO_Desc” field.

[0776] “#GO_Desc” represents the description of the assigned GO entry, corresponding to the mentioned “#GO_Acc” field.

[0777] The assignment of Immune response GO annotation (#GO_Acc 6955# GO_Desc immune response) to Gencarta; transcripts and proteins was baseds on a homology to a viral protein, as described in U.S. Pat. Appl. No. 60/480,752.

[0778] “#CL” represents the confidence level of the GO assignment, when #CL1 is the highest and #CL5 is the lowest possible confidence level. This field appears only when the GO assignment is based on a Swissprot/TremB1 protein accession or Interpro accession and (not on Proloc predictions or viral proteins predictions). Preliminary confidence levels were calculated for all public proteins as follows:

[0779] PCL 1: a public protein that has a curated GO annotation,

[0780] PCL 2: a public protein that has over 85% identity to a public protein with a curated GO annotation,

[0781] PCL 3: a public protein that exhibits 50-85% identity to a public protein with a curated GO annotation,

[0782] PCL 4: a public protein that has under 50% identity to a public protein with a curated GO annotation.

[0783] For each Gencarta protein a homology search against all public proteins was done. If the Gencarta protein has over 95% identity to a public protein with PCL X than the Gencarta protein gets the same confidence level as the public protein. This confidence level is marked as “#CL X”. If the Gencarta protein has over 85% identity but not over 95% to a public protein with PCL X than the Gencarta protein gets a confidence level lower by 1 than the confidence level of the public protein. If the Gencarta protein has over 70% identity but not over 85% to a public protein with PCL X than the Gencarta protein gets a confidence level lower by 2 than the confidence level of the public protein. If the Gencarta protein has over 50% identity but not over 70% to a public protein with PCL X than the Gencarta protein gets a confidence level lower by 3 than the confidence level of the public protein. If the Gencarta protein has over 30% identity but not over 50% to a public protein with PCL X than the Gencarta protein gets a confidence level lower by 4 than the confidence level of the public protein.

[0784] A Gencarta protein may get confidence level of 2 also if it has a true interpro domain that is linked to a GO annotation http://www.geneontology.org/external2go/interpro2go/.

[0785] When the confidence level is above “1”, GO annotations of higher levels of the GO hierarchy are assigned (e.g. for “#CL 3” the GO annotations provided, is as appears plus the 2 GO annotations above it in the hierarchy).

[0786] “#DB” marks the database on which the GO assignment relies on. The “sp”, as in Example 10a, relates to SwissProt/TremB1 Protein knowledgebase, available from http://www.expasy.ch/sprot/. “InterPro”, as in Example 10c, refers to the InterPro combined database, available from http://www.ebi.ac.uk/interpro/, which contains information regarding protein families, collected from the following databases: SwissProt (http://www.ebi.ac.uk/swissprot/), Prosite (http://www.expasy.ch/prosite/), Pfam (http://www.sanger.ac.uk/Software/Pfam/), Prints (http://www.bioinf.man.ac.uk/dbbrowser/PRINTS/), Prodom (http://prodes.toulouse.inra.fr/prodom/), Smart (http://smart.embl-heidelberg.de/) and Tigrfams (http://www.tigr.org/TIGRFAMs/). PROLOC means the method used was Proloc based on statistics Proloc uses for predicting the subcellular localization of a protein #EN” represents the accession of the entity in the database (#DB), corresponding to the accession of the protein/domain why the GO was predicted. If the GO assignment is based on a protein from the SwissProt/TremB1 Protein database this field will have the locus name of the protein. Examples, “#DB sp #EN NRG2_HUMAN” means that the GO assignment in this case was based on a protein from the SwissProt/Tremb1 database, while the closest homologue (that has a GO assignment) to the assigned protein is depicted in SwissProt entry “NRG2_HUMAN “#DB interpro #EN IPR001609” means that GO assignment in this case was based on InterPro database, and the protein had an Interpro domain, IPR001609, that the assigned GO was based on. In Proloc predictions this field will have a Proloc annotation “#EN Proloc”. #GENE_SYMBOL—for each Gencarta contig a HUGO gene symbol was assigned in two ways:

[0787] (i) After assigning a Swissprot/TremB1 proteins to each contig (see Assignment of Swissprot/TremB1 accessions to Gencarta contigs) all the gene symbols that appear for the Swissprot entry were parsed and added as a Gene symbol annotation to the gene.

[0788] (ii) LocusLink information—LocusLink was downloaded from NCBI ftp)://ftp.ncbi.nih.gov/refseq/LocusLink/ (files loc2acc, loc2ref, and LL.out_hs). The data was integrated producing a file containing the gene symbol for every sequence. Gencarta contigs were assigned a gene symbol if they contain a sequence from this file that has a gene symbol

[0789] Example: #GENE_SYMBOL MMP15

[0790] #DIAGNOSTICS—KGencarta contigs representing known diagnostic markers (such as listed in Table 5, below) and all transcripts and proteins deriving from this contig will be assigned to this field and will get the above mentioned annotation followed by “as indicated in the Diagnostic markers table”.

TABLE 5

| | | |
|---|---|---|
| Test | Gencarta Contig | Comments |

Enzymes

| | | |
|---|---|---|
| GPT | R35137 (GPT glutamic-pyruvate | Also called ALT - alanine |
| | transaminase (alanine aminotransferase)) | aminotransferase. Standard liver |
| | Z24841 (GPT2 glutamic pyruvate | function test |
| | transaminase (alanine aminotransferase) | |
| | 2) | |
| GOT | M78228 (GOT1 glutamic-oxaloacetic | Also called AST - aspartate |
| | transaminase 1, soluble (aspartate | aminotransferase. Standard liver |
| | aminotransferase 1)) | function test |
| | M86145 (GOT2 glutamic-oxaloacetic | |
| | transaminase 2, mitochondrial (aspartate | |
| | aminotransferase 2) | |
| GGT | HUMGGTX (GGT1: gamma- | Liver disease |
| | glutamyltransferase 1) | |
| CPK | T05088 (CKB creatine kinase, brain) | Also called CK. Mostly used for muscle |
| | HUMCKMA (CKM creatine kinase, | pathologies. The MB variant is heart |
| | muscle) | specific and used in the diagnosis of |
| | H20196 (CKMT1 creatine kinase, | myocardial infarction |
| | mitochondrial 1 (ubiquitous)) | |
| | HUMSMCK (CKMT2 creatine kinase, | |
| | mitochondrial 2 (sarcomeric)) | |
| CPK-MB | T05088 (CKB creatine kinase, brain) | Cardiac problems - hetro-dimer of |
| | HUMCKMA (CKM creatine kinase, | CKB and CKM |
| | muscle) | |
| Alkaline | HSAPHOL-ALPL: alkaline phosphatase, | Bone related syndromes and liver |
| Phosphatase | liver/bone/kidney | diseases, mostly with biliary |
| | HUMALPHB-ALPI: alkaline | involvement |
| | phosphatase, intestinal | |
| | HUMALPP-ALPP: alkaline phosphatase, | |
| | placental (Regan isozyme) | |
| Amylase | AA367524 - (AMY1A: amylase, alpha | Blood/Urine. Pancreas related diseases |
| | 1A; salivary) | |
| | T10898 - (AMY2B: amylase, alpha 2B; | |
| | pancreatic and 2A) | |
| LDH | HSLDHAR (LDHA lactate | Lactate Dehydrogenase. Used for |
| | dehydrogenase A) | myocardial infarction diagnosis and |
| | M77886 (LDHB lactate dehydrogenase | neoplastic syndromes assessment. |
| | B) | |
| | HSU13680 (LDHC lactate dehydrogenase | |
| | C) | |
| | AA398148 (LDHL lactate dehydrogenase | |
| | A-like) | |
| | R09053 (LDHD lactate dehydrogenase D) | |
| G6PD | S58359 (G6PD glucose-6-phosphate | Glucose 6-phosphate dehydrogenase. |
| | dehydrogenase) | Levels measured when deficiency is |
| | | suspected (leading to susceptibility to |
| | | hemolysis) |
| Alpha1 | HUMA1ACM (SERPINA3 serine (or | Chronic lung diseases |
| antiTrypsin | cysteine) proteinase inhibitor, clade, A | |
| | (alpha-1 antiproteinase, antitrypsin), | |
| | member 3) | |
| | T10891 (AGT angiotensinogen (serine (or | |
| | cysteine) proteinase inhibitor, clade A | |
| | (alpha-1 antiproteinase, antitrypsin), | |
| | member | |
| | 8)) | |
| | R83168 (SERPINA6 serine (or cysteine) | |
| | proteinase inhibitor, clade A (alpha-1 | |
| | antiproteinase, antitrypsin), member 6) | |
| | HUMCINHP (SERPINA5 serine (or | |
| | cysteine) proteinase inhibitor, clade A | |
| | (alpha-1 antiproteinase, antitrypsin), | |
| | member 5) | |
| | HSA1ATCA (SERPINA1 serine (or | |
| | cysteine) proteinase inhibitor, clade A | |
| | (alpha-1 antiproteinase, antitrypsin), | |
| | member 1) | |
| | HUMKALLS (SERPINA4 serine (or | |
| | cysteine) proteinase inhibitor, clade A | |
| | (alpha-1 antiproteinase, antitrypsin), | |
| | member 4) | |
| | HUMTBG (SERPINA7 serine (or | |
| | cysteine) proteinase inhibitor, clade A | |
| | (alpha-1 antiproteinase, antitrypsin), | |
| | member 7) | |
| | T60354 (SERPINA10 serine (or cysteine) | |
| | proteinase inhibitor, clade A (alpha-1 | |
| | antiproteinase, antitrypsin), member 10) | |
| Renin | HSRENK (REN renin) | Some hypertension syndromes |
| Acid | HUMAAPA (ACP1: acid phosphatase 1, | Used to differentiate multiple myeloma |
| Phosphatase | soluble) | with other monoclonal gammopathies |
| | T48863 (ACP2: acid phosphatase 2, | of uncertain significance |
| | lysosomal) | |
| | HSMRACP5 (ACP5: acid phosphatase 5, | |
| | tartrate resistant) | |
| | T85211 (ACP6: lysophosphatidic acid | |
| | phosphatase) | |
| | HSPROSAP (ACPP: acid phosphatase, | |
| | prostate) | |
| | AA005037 (ACPT: acid phosphatase, | |
| | testicular) | |
| Beta | T11069 (GUSB glucuronidase, beta) | Used to differentiate multiple myeloma |
| glucoronidase | | with other monoclonal gammopathies |
| | | of uncertain significance |
| Aldolase | HSALDAR (ALDOA aldolase A, | Glycogen storage diseases |
| | fructose-bisphosphate) | |
| | HSALDOBR (ALDOB aldolase B, | |
| | fructose-bisphosphate) | |
| | M62176 (ALDOC aldolase C, fructose- | |
| | bisphosphate) | |
| Choline esterase | HUMCHEF (BCHE | Probably used for |
| | butyrylcholinesterase) | organophosphates/“nerve gases” |
| | F00931 (ACHE acetylcholinesterase (YT | intoxications |
| | blood group)) | |
| Pepsinogen | HUMPGCA PGC: progastricsin | (in the stomach), high in gastritis, low |
| | (pepsinogen C) | in pernicious anemia[ |
| ACE | HSACE (ACE: angiotensin I converting | Angiotensin-converting enzyme |
| | enzyme (peptidyl-dipeptidase A) 1) | Sarcoidosis |
| | AA397955 (ACE2: angiotensin I | |
| | converting enzyme (peptidyl-dipeptidase | |
| | A) 2) | |

Miscelleneous

| | | |
|---|---|---|
| Prion Protein | HUMPRP0A (PRNP prion protein (p27-30) | BSE diagnosis |
| | (Creutzfeld-Jakob disease, | |
| | Gerstmann-Straus | |
| | ler-Scheinker syndrome, fatal familial | |
| | insomnia)) | |
| | W73057 (PRND prion protein 2 (dublet)) | |
| Myelin basic | M78010 (MBP myelin basic protein) | In CSF. In Multiple sclerosis |
| protein | R13982 (MOBP myelin-associated | |
| | oligodendrocyte basic protein) | |
| Albumin | HSALB1 (ALB albumin) | Mostly liver function and failure of |
| | | intestine absorption |
| Prealbumin | HSALB1 (ALB albumin) | early diagnosis of malabsorption |
| Ferritin | HUMFERLS (FTL ferritin, light | Iron deficiency anemia |
| | polypeptide) | |
| | HUMFERHA (FTH1 ferritin, heavy | |
| | polypeptide 1) | |
| Transferrin | S95936 (TF transferrin) | Iron deficiency anemia |
| Haptoglobin | HUMHPA1B (HP haptoglobin) | Used in anemia states and neoplastic |
| | | syndromes |
| CRP | HSCREACT (CRP C-reactive protein, | C reactive protein. Associated with |
| | pentraxin-related) | active inflammation |
| AFP | D11581 (AFP alpha-fetoprotein) | Alpha Feto Protein. Used in pregnancy |
| | | for abnormalities screening and as a |
| | | cancer marker. |
| C3 | T40158 (C3 complement component 3) | Various auto-immune and allergy |
| | | syndromes |
| C4 | HSCOC4 (C4A complement component | Various auto-immune and allergy |
| | 4A; C4B complement component 4B) | syndromes |
| Ceruloplasmin | HSCP2 (CP ceruloplasmin (ferroxidase)) | Wilson's disease (liver disease) |
| Myoglobin | T11628 (MB myoglobin) | Rhabdomyolysis, Myocardial infarction |
| FABP | S67314 (FABP3: fatty acid binding | myoglobin and Fatty Acid Binding |
| | protein 3, muscle and heart) | |
| | D11754 (FABP1 liver-L-FABP-fatty | |
| | acid binding protein 1) | |
| | AW605378 (FABP2: fatty acid binding | |
| | protein 2, intestinal) | |
| | HUMALBP (FABP4: fatty acid binding | |
| | protein 4, adipocyte) | |
| | T06152 (FABP5: fatty acid binding | |
| | protein 5 (psoriasis-associated) | |
| | HSI15PGN1 (FABP6: fatty acid binding | |
| | protein 6, ileal (gastrotropin) | |
| | R60348 (FABP7: fatty acid binding | |
| | protein 7, brain) | |
| Troponin I | HUMTROPNIN (TNNI2 troponin I, | Acute myocardial infarction |
| | skeletal, fast) | |
| | Z25083 (TNNI1 troponin I, skeletal, | |
| | slow) | |
| | HUMTROPIA (TNNI3 troponin I, | |
| | cardiac) | |
| Beta-2- | HSB2MMU (B2M beta-2-microglobulin) | |
| microglobulin | | |
| Macroglobin | M62177 (A2M: alpha-2-macroglobulin) | Elevated in inflammation |
| Alpha-1 | T72188 (A1BG: alpha-1-B glycoprotein) | Elevated in inflammation and tumors, |
| glycoprotein | | |
| Apo A-I | HUMAPOAIP (APOA1: apolipoprotein | Risk for coronary artery disease |
| | A-I) | |
| Apo B-100 | HSAPOBR2 (APOB: apolipoprotein B | Atherosclerotic heart disease |
| | (including Ag(x) antigen)) | |
| Apo E | T61627 (APOE: apolipoprotein E) | diagnosis of Type III |
| | | hyperlipoproteinemia, evaluate a |
| | | possible genetic component to |
| | | atherosclerosis, or to help confirm a |
| | | diagnosis of late onset AD |
| CF gene | HUMCFTRM (CFTR: cystic fibrosis | Cystic fibrosis disease (a DNA test - |
| | transmembrane conductance regulator, | blood sample) |
| | ATP-binding cassette (sub-family C, | |
| | member 7)) | |
| PSEN1 gene | T89701 (PSEN1: presenilin 1 (Alzheimer | Early onset of familial AD (a DNA test - |
| | disease 3)) | blood sample) |

Hormones

| | | |
|---|---|---|
| Erythropoietin | HSERPR (EPO erythropoietin) | Hardly used for diagnosis. Used as |
| | | treatment |
| GH | HSGROW1 (GH1 growth hormone 1) | Growth Hormone. Endocrine |
| | HUMCS2 (GH2 growth hormone 2) | syndromes |
| TSH | AV745295 (TSHB thyroid stimulating | Part of thyroid functions tests |
| | hormone, beta) | |
| betaHCG | R27266 (CGB5 chorionic | Pregnancy, malignant syndromes in |
| | gonadotropin, beta polypeptide 5) | men and women |
| LH | HUMCGBB50 (LHB luteinizing | Part of standard hormonal profile for |
| | hormone beta polypeptide) | fertility, gynecological syndromes and |
| | | endocrine syndromes |
| FSH | AV754057 (FSHB follicle stimulating | Part of standard hormonal profile for |
| | hormone, beta polypeptide) | fertility, gynecological syndromes and |
| | | endocrine syndromes |
| TBG | S40807 (TG thyroglobulin) | Thyroxin binding globulin. Thyroid |
| | | syndromes |
| Prolactin | HSLACT (PRL prolactin) | Various endocrine syndromes |
| Thyroglobulin | S40807 (TG thyroglobulin) | Follow up of thyroid cancer patients |
| PTH | HSTHYR (PTH parathyroid hormone) | Parathyroid Hormone. Syndromes of |
| | | calcium management |
| Insulin/Pre Insulin | HSPPI (INS insulin) | Diabetes |
| Gastrin | HSGAST (GAS gastrin) | Peptic ulcers |
| Oxytocin | HUMOTCB (OXT oxytocin, prepro- | Endocrine syndromes related to |
| | (neurophysin I)) | lactation |
| AVP | HUMVPC (AVP arginine vasopressin | Arginine Vasopressin. Endocrine |
| | (neurophysin II, antidiuretic hormone, | syndromes related to the osmotic |
| | diabetes | pressure of body fluids |
| | insipidus, neurohypophyseal)) | |
| ACTH | HUMPOMCMTC (POMC: | Secreted from the anterior pituitary |
| | proopiomelanocortin | gland. Regulation of cortisol. |
| | (adrenocorticotropin/beta-lipotropin/ | Abnormalities are indicative of |
| | alpha-melanocyte stimulating | Cushing's disease, addison's disease |
| | hormone/beta-melanocyte stimulating | and adrenal tumors |
| | hormone/beta-endorphin)) | |
| BNP | HUMNATPEP (NPPB: natriuretic | Heart failure |
| | peptide precursor B) | |

Blood Clotting

| | | |
|---|---|---|
| Protein C | S50739 (PROC protein C (inactivator of | Inherited Clotting disorders |
| | coagulation factors Va and VIIIa)) | |
| Protein S | HSSPROTR (PROS1 protein S (alpha)) | Inherited Clotting disorders |
| Fibrinogen | D11940 (FGA: fibrinogen, A alpha | Clotting disorders |
| | polypeptide) | |
| | HUMFBRB (FGB: fibrinogen, B beta | |
| | polypeptide) | |
| | T24021 (FGG: fibrinogen, gamma | |
| | polypeptide) | |
| Factors 2, 5, 7, | HUMPTHROM (F2 coagulation factor II | Inherited Clotting disorders |
| 9, 10, 11, 12, 13 | (thrombin)) | |
| | HUMTFPC (F3 coagulation factor III | |
| | (thromboplastin, tissue factor)) | |
| | HUMF5A (F5 coagulation factor V | |
| | (proaccelerin, labile factor)) | |
| | M78203 (F7 coagulation factor VII (serum | |
| | prothrombin conversion accelerator)) | |
| | HUMF8C (F8 coagulation factor VIII, | |
| | procoagulant component (hemophilia A)) | |
| | HUMCFIX (F9 coagulation factor IX (plasma | |
| | thromboplastic component, Christmas disease, | |
| | hemophilia B)) | |
| | HUMCFX (F10: coagulation factor X) | |
| | HUMEXI (F11 coagulation factor XI (plasma | |
| | thromboplastin antecedent)) | |
| | HUMCFXIIA (F12 coagulation factor XII | |
| | (Hageman factor)) | |
| | HUMFXIIIA (F13A1 coagulation factor XIII, | |
| | A1 polypeptide) | |
| | R28976 (F13B coagulation factor XIII, B | |
| | polypeptide) | |
| vWF | HUMVWF (VWF von Willebrand factor) | Von Willebrand factor. Inherited |
| | | Clotting disorders |
| Antithrombin | T62060 (SERPINC1 serine (or cysteine) | Inherited Clotting disorders |
| III | proteinase inhibitor, clade C (antithrombin), | |
| | member 1) | |

Cancer Markers

| | | |
|---|---|---|
| AFP | D11581 (AFP alpha-fetoprotein) | Pregnancy, testicular cancer and |
| | | hepatocellular cancer |
| CA125 | HSIAI3B (M17S2 membrane component, | Ovarian cancer |
| | chromosome 17, surface marker 2 (ovarian | |
| | carcinoma antigen CA125)) | |
| CA-15-3 | HSMUC1A (MUC1 mucin 1, transmembrane) | Breast cancer |
| CA-19-9 | HSAFUTF (FUT3: fucosyltransferase 3 | Gastrointestinal cancer, pancreatic |
| | (galactoside 3(4)-L-fucosyltransferase, Lewis | cancer |
| | blood group included)) | |
| CEA | T10888 HUMCEA (CEACAM3 | Carcinoembryonic Antigen. |
| | carcinoembryonic antigen-related cell adhesion | Colorectal cancer |
| | molecule 3) | |
| PSA | HSCDN9 (KLK3: kallikrein 3, (prostate | |
| | specific antigen)) | |
| PSMA | HUMPSM (FOLH1: folate hydrolase | |
| | (prostate-specific membrane antigen) 1) | |
| TPA, TATI, | HSPSTI (SPINK1: serine protease inhibitor, | Ovarian cancer |
| OVX1, LASA, | Kazal type 1) | |
| CA54/81 | | |
| BRCA 1 | H90415 (BRCA1: breast cancer 1, early onset) | |
| BRCA 2 | H47777 (BRCA2: breast cancer 2, early onset) | Breast cancer (ovarian cancer). |
| HER2/Neu | S57296 (ERBB2: v-erb-b2 erythroblastic | Breast cancer |
| | leukemia viral oncogene homolog 2, | |
| | neuro/glioblastoma derived oncogene homolog | |
| | (avian)) | |
| Estrogen | HSERG5UTA (ESR1: estrogen receptor 1) | Breast cancer |
| receptor | HSRINAERB (ESR2: estrogen receptor 2 (ER | |
| | beta)) | |
| Progesterone | T09102 (PGRMC1: progesterone receptor | Breast cancer |
| | membrane component 1) | |
| | Z32891 (PGRMC2: progesterone receptor | |
| | membrane component 2) | |

Note:
(i) Small portion of these “markers” are also drug targets, whether already for approved drugs (such as alpha1 antiTrypsin) or under development (e.g., GOT).
(ii) Some of these “markers” are also used as therapeutic proteins (e.g., Erythropoietin).
(iii) All markers are found in the blood/serum unless otherwise specified.

[0791] 1. #DISEASE_RELATED_CLINICAL_PHENOTYPE—This field denotes the possibility of using biomolecular sequences of the present invention for the diagnosis and/or treatment of genetic diseases such as listed in the following URL: http://www.geneclinics.org/servlet/access?id=8888891&key=X9D790O5re1Az&db=genetests&res=&fcn=b&grp=g&genesearch=true&testtype=both&1s=1&type=e&qry=&submit=Search and in Table 6, below is list includes genetic diseases and genes which may be used for the detection and/or treatment thereof. As such, newly uncovered variants of these genes, including novel SNPs or mutations may be used for improved diagnosis and/or treatment when used singly or in combination with the previously described genes. For example, in genetic diseases where the diseased phenotype has a different splice variant of the than the healthy phenotype, like that seen in Thalasemia and in Duchenne Macular Dystrophy, the novel splice variants might discriminate between healthy and diseased phenotype.

[0792] Another example is in cases of autosomal recessive genetic diseases. Some of the sequences in genebank were sequenced from malfunctioning alleles derived from healthy carriers of the disease, and therefore contain the mutation that leads to the disease. Identification of novel SNPs predicted based on sequence alignment can assist in identifying disease-causing mutations.

TABLE 6

| Gencarta Contig | Gene Symbol | Disease |
|---|---|---|
| HSCFTRMA | CFTR | Congenital Bilateral Absence of the Vas Deferens; |
| | | Cystic Fibrosis |
| HUMCFTRM | CFTR | Congenital Bilateral Absence of the Vas Deferens; |
| | | Cystic Fibrosis |
| HUMFGFR3 | FGFR3 | Achondroplasia; Crouzon Syndrome with Acanthosis |
| | | Nigricans; FGFR-Related Craniosynostosis Syndromes; |
| | | Hypochondroplasia; Muenke Syndrome; Severe |
| | | Achondroplasia with Developmental Delay and |
| | | Acanthosis Nigricans (SADDAN); Thanatophoric |
| | | Dysplasia |
| HSU11690 | FGD1 | Aarskog Syndrome |
| HSCA1III | COL3A1 | Ehlers-Danlos Syndrome, Vascular Type |
| HUMCOL2A1B | COL2A1 | Achondrogenesis Type 2; Kniest Dysplasia; |
| | | Spondyloepimetaphyseal Dysplasia, Strudwick Type; |
| | | Sponclyloepiphyseal Dysplasia, Congenita; Stickler |
| | | Syndrome; Stickler Syndrome Type I |
| R68817 | APRT | Adenine Phosphoribosyltransferase Deficiency |
| HUMAMPD1 | AMPD1 | Adenosine Monophosphate Deaminase 1 |
| M62124 | PXR1 | Zellweger Syndrome Spectrum |
| HSXLALDA | ABCD1 | Adrenoleukodystrophy, X-Linked |
| T28718 | BTK | X-Linked Agammaglobulinemia |
| R91110 | IL2RG | X-Linked Severe Combined Immunodeficiency |
| HUMPEDG | OCA2 | Oculocutaneous Albinism Type 2 |
| HSU01873 | TYR | Oculocutaneous Albinism Type 1 |
| HSOA1MRNA | OA1 | Ocular Albinism, X-Linked |
| R14843 | TYRP1 | Oculocutaneous Albinism Type 3 (TRP1 Related) |
| HSALDAR | ALDOA | Aldolase A Deficiency |
| T40633 | HBA1 | Alpha-Thalassemia |
| T40633 | HBA2 | Alpha-Thalassemia; Hemoglobin Constant Spring |
| HSU09820 | ATRX | Alpha-Thalassemia X-Linked Mental Retardation |
| | | Syndrome |
| HUMCOL4A5 | COL4A5 | Alport Syndrome; Alport Syndrome, X-Linked |
| T61627 | APOE | Apolipoprotein E Genotyping; Familial Combined |
| | | Hyperlipidemia; Hyperlipoproteinemia Type III |
| T89701 | PSEN1 | Alzheimer Disease Type 3; Early-Onset Familial |
| | | Alzheimer Disease |
| R05822 | PSEN2 | Alzheimer Disease Type 4; Early-Onset Familial |
| | | Alzheimer Disease |
| HSTTRM | TTR | Transthyretin Amyloidosis |
| T23978 | SOD1 | Amyotrophic Lateral Sclerosis |
| HUMANDREC | AR | Androgen Insensitivity Syndrome; Spinal and Bulbar |
| | | Muscular Atrophy |
| Z19491 | UBE3A | Angelman Syndrome |
| HUMPAX6AN | PAX6 | Aniridia; Anophthalmia; Isolated Aniridia; Peters |
| | | Anomaly; Peters Anomaly with Cataract; Wilms |
| | | Tumor-Aniridia-Genital Anomalies-Retardation |
| | | Syndrome |
| HUMKGFRA | FGFR2 | Apert Syndrome; Beare-Stevenson Syndrome; Crouzon |
| | | Syndrome; FGFR-Related Craniosynostosis Syndromes; |
| | | Jackson-Weiss Syndrome; Pfeiffer Syndrome Type 1, |
| | | 2, and 3 |
| HSU03272 | FBN2 | Congenital Contractural Arachnodactyly |
| Z19459 | AMCD1 | Arthrogryposis Multiplex Congenita, Distal, Type I |
| T88756 | ATM | Ataxia-Telangiectasia |
| H30056 | BBS1 | Bardet-Biedl Syndrome |
| Z25009 | BBS2 | Bardet-Biedl Syndrome |
| T64876 | BBS4 | Bardet-Biedl Syndrome |
| N27125 | PTCH | Nevoid Basal Cell Carcinoma Syndrome |
| N31453 | VMD2 | Best Vitelliform Macular Dystrophy |
| HUMHBB3E | HBB | Beta-Thalassemia; Hemoglobin E; Hemoglobin S Beta- |
| | | Thalassemia; Hemoglobin SC; Hemoglobin SD; |
| | | Hemoglobin SO; Hemoglobin SS; Sickle Cell Disease |
| H53763 | BLM | Bloom Syndrome |
| N22283 | EYA1 | Branchiootorenal Syndrome |
| H90415 | BRCA1 | BRCA1 and BRCA2 Hereditary Breast/Ovarian Cancer; |
| | | BRCA1 Hereditary Breast/Ovarian Cancer |
| H47777 | BRCA2 | BRCA1 and BRCA2 Hereditary Breast/Ovarian Cancer; |
| | | BRCA2 Hereditary Breast/Ovarian Cancer |
| Z33575 | SOX9 | Campomelic Dysplasia |
| S67156 | ASPA | Canavan Disease |
| T52465 | CPS1 | Carbamoylphosphate Synthetase I Deficiency |
| HSVD3HYD | CYP27A1 | Cerebrotendinous Xanthomatosis |
| S66705 | MPZ | Charcot-Marie-Tooth Neuropathy Type 1; Charcot- |
| | | Marie-Tooth Neuropathy Type 1B; Congenital |
| | | Hypomyelination |
| HSGAS3MR | PMP22 | Charcot-Marie-Tooth Neuropathy Type 1; Charcot- |
| | | Marie-Tooth Neuropathy Type 1A; Charcot-Marie- |
| | | Tooth Neuropathy Type 1E; Hereditary Neuropathy |
| | | with Liability to Pressure Palsies |
| T93208 | PMP22 | Charcot-Marie-Tooth Neuropathy Type 1; Charcot- |
| | | Marie-Tooth Neuropathy Type 1A; Charcot-Marie- |
| | | Tooth Neuropathy Type 1E; Hereditary Neuropathy |
| | | with Liability to Pressure Palsies |
| HSGAPJR | GJB1 | Charcot-Marie-Tooth Neuropathy Type X |
| HSXCGD | CYBB | Chronic Granulomatous Disease |
| S67289 | CYBB | Chronic Granulomatous Disease |
| HSASD | ASS | Citrullinemia |
| HUMPAX2A | PAX2 | Anophthalmia; Renal-Coloboma Syndrome |
| HUMP45C21 | CYP21A2 | 21-Hydroxylase Deficiency |
| S74720 | NR0B1 | Complex Glycerol Kinase Deficiency; Dosage- |
| | | Sensitive Sex Reversal; Isolated X-Linked Adrenal |
| | | Hypoplasia Congenita; X-Linked Adrenal Hypoplasia |
| | | Congenita |
| HSKERTRNS | TGM1 | Autosomal Recessive Congenital Ichthyosis |
| BF928311 | CPO | Hereditary Coproporphyria |
| HSCPPOX | CPO | Hereditary Coproporphyria |
| HUMTGFBIG | TGFBI | Avellino Corneal Dystrophy; Granular Corneal |
| | | Dystrophy; Lattice Corneal Dystrophy Type I |
| R08437 | MSX2 | Craniosynostosis Type II; Parietal Foramina 1 |
| HUMPRP0A | PRNP | Prion Diseases |
| T08652 | DRPLA | DRPLA |
| Z46151 | DRPLA | DRPLA |
| HSWT1 | WT1 | Denys-Drash Syndrome; Wilms Tumor; Wilms Tumor- |
| | | Aniridia-Genital Anomalies-Retardation Syndrome; |
| | | WT1-Related Disorders |
| HUMWT1X | WT1 | Denys-Drash Syndrome; Wilms Tumor; Wilms Tumor- |
| | | Aniridia-Genital Anomalies-Retardation Syndrome; |
| | | WT1-Related Disorders |
| M78080 | ATP2A2 | Darier Disease |
| Z30219 | DCR | Down Syndrome Critical Region |
| T11279 | DKC1 | Dyskeratosis Congenita |
| T08131 | DYT1 | Early-Onset Primary Dystonia (DYT1) |
| T50729 | ED1 | Hypohidrotic Ectodermal Dysplasia; Hypohidrotic |
| | | Ectodermal Dysplasia, X-Linked |
| HUMPA1V | COL5A1 | Ehlers-Danlos Syndrome, Classic Type |
| HUMLYSYL | PLOD | Ehlers-Danlos Syndrome, Kyphoscoliotic Form |
| HSCOLIA | COL1A2 | Ehlers-Danlos Syndrome, Arthrochalasia Type; |
| | | Osteogenesis Imperfecta |
| HUMCG1PA1 | COL1A1 | Ehlers-Danlos Syndrome, Arthrochalasia Type; |
| | | Osteogenesis Imperfecta |
| Z30171 | TAZ | 3-Methylglutaconic Aciduria Type 2; Cardiomyopathy; |
| | | Dilated Cardiomyopathy; Endocardial Fibroelastosis; |
| | | Familial Isolated Noncompaction of Left Ventrical |
| | | Myocardium |
| Z39302 | TAZ | 3-Methylglutaconic Aciduria Type 2; Cardiomyopathy; |
| | | Dilated Cardiomyopathy; Endocardial Fibroelastosis; |
| | | Familial Isolated Noncompaction of Left Ventrical |
| | | Myocardium |
| HUMKERK5A | KRT5 | Epidermolysis Bullosa Simplex |
| R72295 | KRT14 | Epidermolysis Bullosa Simplex |
| HUMKTEP2A | KRT1 | Epidermolytic Hyperkeratosis; Nonepidermolytic |
| | | Palmoplantar Hyperkeratosis |
| HUMK10A | KRT10 | Epidermolytic Hyperkeratosis |
| M78482 | CHS1 | Chediak-Higashi Syndrome |
| HSTCD1 | CHM | Choroideremia |
| HSAGALAR | GLA | Fabry Disease |
| T79651 | GLA | Fabry Disease |
| HUMF5A | F5 | Factor V Leiden Thrombophilia; Factor V R2 Mutation |
| | | Thrombophilia |
| HUMFXI | F11 | Factor XI Deficiency |
| M79108 | APC | Colon Cancer (APC I1307K related); Familial |
| | | Adenomatous Polyposis |
| T10619 | IKBKAP | Familial Dysautonomia |
| HUMFMR1 | FMR1 | Fragile X Syndrome |
| M78417 | FMR2 | FRAXE Syndrome |
| R06415 | FRDA | Friedreich Ataxia |
| HSALDOBR | ALDOB | Hereditary Fructose Intolerance |
| HUMALFUC | FUCA1 | Fucosidosis |
| M85904 | FH | Fumarate Hydratase Deficiency |
| H85361 | ABCA4 | Age-Related Macular Degeneration; Retinitis |
| | | Pigmentosa, Autosomal Recessive; Stargardt Disease 1 |
| R31596 | GALK1 | Galactokinase Deficiency |
| T53762 | GALT | Galactosemia |
| HUMGCB | GBA | Gaucher Disease |
| T48672 | GBA | Gaucher Disease |
| HSGCRAR | NR3C1 | Glucocorticoid Resistance |
| S58359 | G6PD | Glucose-6-Phosphate Dehydrogenase Deficiency |
| HSGKTS1 | GK | Glycerol Kinase Deficiency |
| HSRNAGLK | GK | Glycerol Kinase Deficiency |
| U01120 | G6PC | Glycogen Storage Disease Type Ia |
| HUMGAAA | GAA | Glycogen Storage Disease Type II |
| F00985 | AGL | Glycogen Storage Disease Type III |
| HUMHGBE | GBE1 | Glycogen Storage Disease Type IV |
| HSPHOSR1 | PYGM | Glycogen Storage Disease Type V |
| D12179 | PYGL | Glycogen Storage Disease Type VI |
| HSHMPFK | PFKM | Glycogen Storage Disease Type VII |
| HUMGLI3A | GLI3 | GLI3-Related Disorders; Greig Cephalopolysyndactyly |
| | | Syndrome; Pallister-Hall Syndrome |
| F09335 | ATP2C1 | Hailey-Hailey Disease |
| M62210 | CCM1 | Angiokeratoma Corporis Diffusum with Arteriovenous |
| | | Fistulas; Familial Cerebral Cavernous Malformation |
| T59431 | HFE | HFE-Associated Hereditary Hemochromatosis |
| HSALK1A | ACVRL1 | Hereditary Hemorrhagic Telangiectasia |
| HUMENDO | ENG | Hereditary Hemorrhagic Telangiectasia |
| HUMF8C | F8 | Hemophilia A |
| HUMFVIII | F8 | Hemophilia A |
| HUMCFIX | F9 | Hemophilia B |
| HSU03911 | MSH2 | Hereditary Non-Polyposis Colon Cancer |
| Z24775 | MLH1 | Hereditary Non-Polyposis Colon Cancer |
| HSRETTT | RET | Hirschsprung Disease; Multiple Endocrine Neoplasia |
| | | Type 2 |
| HUMSHH | SHH | Holoprosencephaly 3 |
| N81026 | TBX5 | Holt-Oram Syndrome |
| M78262 | CBS | Homocystinuria |
| T06035 | IDS | Mucopolysaccharidosis Type II |
| T03828 | HD | Huntington Disease |
| H27612 | IDUA | Mucopolysaccharidosis Type I |
| M62205 | GFAP | Alexander Disease |
| HUMCD40L | TNFSF5 | Hyper IgM Syndrome, X-Linked |
| HUMPTHROM | F2 | Prothrombin G20210A Thrombophilia |
| T61466 | MTHFR | MTHFR Deficiency; MTHFR Thermolabile Variant |
| HUMSKM1A | SCN4A | Hyperkalemic Periodic Paralysis Type 1; Hypokalemic |
| | | Periodic Paralysis; Hypokalemic Periodic Paralysis |
| | | Type 2; Myotonia Congenita, Dominant; |
| | | Paramyotonia Congenita |
| HSU09784 | CACNA1S | Hypokalemic Periodic Paralysis; Hypokalemic Periodic |
| | | Paralysis Type 1; Malignant Hyperthermia |
| | | Susceptibility |
| HUMLPLAA | LPL | Familial Lipoprotein Lipase Deficiency |
| HUMPEX | PHEX | Hypophosphatemic Rickets, X-Linked Dominant |
| M78626 | STS | Ichthyosis, X-Linked |
| R56102 | IKBKG | Incontinentia Pigmenti |
| Z39843 | IVD | Isovaleric Acidemia |
| S60085S1 | KAL1 | Kallmann Syndrome, X-Linked |
| T55061 | KEL | Kell Antigen Genotyping |
| HUMGALC | GALC | Krabbe Disease |
| HUMZFPSREB | ZNF9 | Myotonic Dystrophy Type 2 |
| Z19342 | KIF1B | Charcot-Marie-Tooth Neuropathy Type 2 |
| T11351 | NPC2 | Niemann-Pick Disease Type C |
| Z39096 | NDRG1 | Charcot-Marie-Tooth Neuropathy Type 4 |
| AA984421 | PRX | Charcot-Marie-Tooth Neuropathy Type 4; Charcot- |
| | | Marie-Tooth Neuropathy Type 4F |
| HUMRETGC | GUCY2D | Leber Congenital Amaurosis |
| HSU18991 | RPE65 | Leber Congenital Amaurosis; Retinitis Pigmentosa, |
| | | Autosomal Recessive |
| C16899 | MTND6 | Leber Hereditary Optic Neuropathy; Mitochondrial |
| | | Disorders; Mitochondrial DNA-Associated Leigh |
| | | Syndrome and NARP |
| AA069417 | MTND4 | Leber Hereditary Optic Neuropathy; Mitochondrial |
| | | Disorders; Mitochondrial DNA-Associated Leigh |
| | | Syndrome and NARP |
| HUMCYP3A | MTND4 | Leber Hereditary Optic Neuropathy; Mitochondrial |
| | | Disorders; Mitochondrial DNA-Associated Leigh |
| | | Syndrome and NARP |
| HSCPHC22 | MTND1 | Leber Hereditary Optic Neuropathy; Mitochondrial |
| | | Disorders; Mitochondrial DNA-Associated Leigh |
| | | Syndrome and NARP |
| HUMHPRT | HPRT1 | Lesch-Nyhan Syndrome |
| HUMLHHCGR | LHCGR | Leydig Cell Hypoplasia/Agenesis; Male-Limited |
| | | Precocious Puberty |
| HSP53 | TP53 | Li-Fraumeni Syndrome |
| Z19198 | HADHB | Long Chain 3-Hydroxyacyl-CoA Dehydrogenase |
| | | Deficiency |
| M79018 | HADHA | Long Chain 3-Hydroxyacyl-CoA Dehydrogenase |
| | | Deficiency |
| W93500 | KCNQ1 | Atrial Fibrillation; Jervell and Lange-Nielsen |
| | | Syndrome; LQT 1; Romano-Ward Syndrome |
| S62085 | OCRL | Lowe Syndrome |
| T48981 | FBN1 | Marfan Syndrome |
| HUMASFB | ARSB | Mucopolysaccharidosis Type VI |
| M62202 | GNAS | Albright Hereditary Osteodystrophy; McCune-Albright |
| | | Syndrome; Osseus Heteroplasia, Progressive |
| N46342 | SACS | ARSACS |
| T81605 | FANCD2 | Fanconi Anemia |
| H47777 | FANCD1 | Fanconi Anemia |
| T23877 | ACADM | Medium Chain Acyl-Coenzyme A Dehydrogenase |
| | | Deficiency |
| AA906866 | PARK2 | Parkin Type of Juvenile Parkinson Disease |
| BE140729 | GJB4 | Erythrokeratodermia Variabilis |
| HSU26727 | CDKN2A | Familial Malignant Melanoma |
| T47218 | SPINK5 | Netherton Syndrome |
| HSMNKMBP | ATP7A | ATP7A-Related Copper Transport Disorders |
| R37821 | SHFM4 | Ectrodactyly |
| M78183 | GSN | Amyloidosis V |
| HSARYA | ARSA | Chromosome 22q13.3 Deletion Syndrome; |
| | | Metachromatic Leukodystrophy |
| S68531 | COL10A1 | Metaphyseal Chondrodysplasia, Schmid Type |
| T59742 | CACNA1A | Episodic Ataxia Type 2; Familial Hemiplegic Migraine; |
| | | Spinocerebellar Ataxia Type 6 |
| HSCP2 | HPS3 | Hermansky-Pudlak Syndrome; Hermansky-Pudlak |
| | | Syndrome 3 |
| R21301 | HPS3 | Hermansky-Pudlak Syndrome; Hermansky-Pudlak |
| | | Syndrome 3 |
| HUMBGALRP | GLB1 | GM1 Gangliosidosis; Mucopolysaccharidosis Type |
| | | IVB |
| HSU12507 | KCNJ2 | Andersen Syndrome |
| R28488 | MEN1 | Multiple Endocrine Neoplasia Type 1 |
| HUMCOMP | COMP | COMP-Related Multiple Epiphyseal Dysplasia; |
| | | Multiple Epiphyseal Dysplasia, Dominant; |
| | | Pseudoachondroplasia |
| H30258 | COL9A2 | Multiple Epiphyseal Dysplasia, Dominant |
| T48133 | EXT1 | Hereditary Multiple Exostoses; Multiple Exostoses, |
| | | Type I |
| T06129 | EXT2 | Hereditary Multiple Exostoses; Multiple Exostoses, |
| | | Type II |
| T05624 | LAMA2 | Congenital Muscular Dystrophy with Merosin |
| | | Deficiency |
| HSDYSTIA | DMD | Duchenne/Becker Muscular Dystrophy; |
| | | Dystrophinopathies; X-Linked Dilated |
| | | Cardiomyopathy |
| HSSTA | EMD | Emery-Dreifuss Muscular Dystrophy, X-Linked |
| HSU20165 | BMPR2 | Primary Pulmonary Hypertension |
| M79239 | CAPN3 | Calpainopathy; Limb-Girdle Muscular Dystrophies, |
| | | Autosomal Recessive |
| HSU34976 | SGCG | Gamma-Sarcoglycanopathy; Limb-Girdle Muscular |
| | | Dystrophies, Autosomal Recessive; |
| | | Sarcoglycanopathies |
| HUMADHA | SGCA | Alpha-Sarcoglycanopathy; Limb-Girdle Muscular |
| | | Dystrophies, Autosomal Recessive; |
| | | Sarcoglycanopathies |
| Z25374 | SGCB | Beta-Sarcoglycanopathy; Limb-Girdle Muscular |
| | | Dystrophies, Autosomal Recessive; |
| | | Sarcoglycanopathies |
| N29439 | SGCD | Delta-Sarcoglycanopathy; Dilated Cardiomyopathy; |
| | | Limb-Girdle Muscular Dystrophies, Autosomal |
| | | Recessive; Sarcoglycanopathies |
| N56180 | CASQ2 | Catecholaminergic Ventricular Tachycardia, |
| | | Autosomal Recessive |
| T23560 | CHRNB2 | Nocturnal Frontal Lobe Epilepsy, Autosomal Dominant |
| HSCHRNA44 | CHRNA4 | Nocturnal Frontal Lobe Epilepsy, Autosomal Dominant |
| M78654 | CHRNA4 | Nocturnal Frontal Lobe Epilepsy, Autosomal Dominant |
| T86329 | CDH23 | Usher Syndrome Type 1 |
| D11677 | PABPN1 | Oculopharyngeal Muscular Dystrophy |
| AW449267 | PCDH15 | Usher Syndrome Type 1 |
| HUMCLC | CLCN1 | Myotonia Congenita, Dominant; Myotonia |
| | | Congenita, Recessive |
| S86455 | DMPK | Myotonic Dystrophy Type 1 |
| T70260 | MTM1 | Myotubular Myopathy, X-Linked |
| T12579 | LMX1B | Nail-Patella Syndrome |
| HSTRKT1 | TPM3 | Nemaline Myopathy |
| HUMTROPCK | TPM3 | Nemaline Myopathy |
| Z19248 | NEB | Nemaline Myopathy |
| AF030626 | AVPR2 | Nephrogenic Diabetes Insipidus; Nephrogenic Diabetes |
| | | Insipidus, X-Linked |
| AA780862 | NPHS1 | Congenital Finnish Nephrosis |
| T08860 | ABCC8 | ABCC8-Related Hyperinsulinism; Familial |
| | | Hyperinsulinism |
| AA679741 | KCNJ11 | Familial Hyperinsulinism; KCNJ11-Related |
| | | Hyperinsulinism |
| M77935 | NF1 | Neurofibromatosis 1 |
| HSMEORPRA | NF2 | Neurofibromatosis 2 |
| T08995 | CLN3 | CLN3-Related Neuronal Ceroid-Lipofuscinosis; |
| | | Neuronal Ceroid-Lipofuscinoses |
| T72120 | CLN2 | CLN2-Related Neuronal Ceroid-Lipofuscinosis; |
| | | Neuronal Ceroid-Lipofuscinoses |
| T41059 | GRHPR | Hyperoxaluria, Primary, Type 2 |
| HUMGCRFC | FCGR3A | Neutrophil Antigen Genotyping |
| R21657 | NPC1 | Niemann-Pick Disease Type C; Niemann-Pick Disease |
| | | Type C1 |
| M77961 | SMPD1 | Niemann-Pick Disease Due to Sphingomyelinase |
| | | Deficiency |
| T87256 | SUOX | Sulfocysteinuria |
| D79813 | SOST | SOST-Related Sclerosing Bone Dysplasias |
| T94707 | MATN3 | Multiple Epiphyseal Dysplasia, Dominant |
| HSCOL9AL | COL9A1 | Multiple Epiphyseal Dysplasia, Dominant |
| S69208 | TNNT1 | Nemaline Myopathy |
| Z19459 | TPM2 | Nemaline Myopathy |
| D11793 | SLC2A1 | Glucose Transporter Type 1 Deficiency Syndrome |
| HSCHRX | NDP | Norrie Disease |
| T62791 | OPA1 | Optic Atrophy 1 |
| Z24812 | OFD1 | Oral-Facial-Digital Syndrome Type I |
| HUMOTC | OTC | Ornithine Transcarbamylase Deficiency |
| R66505 | MKKS | Bardet-Biedl Syndrome; McKusick-Kaufman |
| | | Syndrome |
| Z19438 | CHAC | Choreoacanthocytosis |
| HUMRDSA | RDS | Patterned Dystrophy of Retinal Pigment Epithelium; |
| | | Retinitis Pigmentosa, Autosomal Dominant |
| Z30072 | PLP1 | Hereditary Spastic Paraplegia, X-Linked; PLP- |
| | | Related Disorders |
| HSFGR1IG | FGFR1 | FGFR-Related Craniosynostosis Syndromes; Pfeiffer |
| | | Syndrome Type 1, 2, and 3 |
| HUMPHH | PAH | Phenylalanine Hydroxylase Deficiency |
| HSKITCR | KIT | Gastrointestinal Stromal Tumor; Piebaldism |
| HSGROW1 | GH1 | Pituitary Dwarfism I |
| F00079 | GHR | Pituitary Dwarfism II |
| HSPIT1 | POU1F1 | Pituitary-Specific Transcription Factor Defects (PIT1) |
| T58874 | SDHD | Familial Nonchromaffin Paragangliomas |
| HUMINTB3 | ITGB3 | Integrin, Beta 3; Platelet Antigen Genotyping |
| T09245 | PKD1 | Polycystic Kidney Disease 1, Autosomal Dominant; |
| | | Polycystic Kidney Disease, Autosomal Dominant |
| T55657 | PKD2 | Polycystic Kidney Disease 2, Autosomal Dominant; |
| | | Polycystic Kidney Disease, Autosomal Dominant |
| T77325 | PKD2 | Polycystic Kidney Disease 2, Autosomal Dominant; |
| | | Polycystic Kidney Disease, Autosomal Dominant |
| W27963 | PKD2 | Polycystic Kidney Disease 2, Autosomal Dominant; |
| | | Polycystic Kidney Disease, Autosomal Dominant |
| R05352 | PKHD1 | Polycystic Kidney Disease, Autosomal Recessive |
| M77871 | PCLD | Polycystic Liver Disease |
| M78097 | UROD | Porphyria Cutanea Tarda |
| HUMPBG | HMBS | Acute Intermittent Porphyria |
| HUMRODSA | UROS | Congenital Erythropoietic Porphyria |
| T10891 | AGT | Angiotensinogen |
| T67463 | CTSK | Pycnodysostosis |
| M77954 | PDHA1 | Pyruvate Dehydrogenase Deficiency, X-linked |
| Z19400 | PHYH | Refsum Disease, Adult |
| R07476 | PEX1 | Zellweger Syndrome Spectrum |
| Z24965 | RCA1 | Renal Cell Carcinoma |
| H37900 | RHO | Retinitis Pigmentosa, Autosomal Dominant; Retinitis |
| | | Pigmentosa, Autosomal Recessive |
| T24020 | RB1 | Retinoblastoma |
| Z44098 | RS1 | X-Linked Juvenile Retinoschisis |
| HSRH30A | RHCE | Rh C Genotyping; Rh E Genotyping |
| S57971 | RHCE | Rh C Genotyping; Rh E Genotyping |
| T89255 | RHCE | Rh C Genotyping; Rh E Genotyping |
| R60192 | PEX7 | Refsum Disease, Adult; Rhizomelic |
| | | Chondrodysplasia Punctata Type 1 |
| HUMMLC1AA | MLC1 | Megalencephalic Leukoencephalopathy with |
| | | Subcortical Cysts |
| M79106 | MLC1 | Megalencephalic Leukoencephalopathy with |
| | | Subcortical Cysts |
| T64905 | PITX2 | Anophthalmia; Peters Anomaly; Rieger Syndrome |
| Z41163 | CREBBP | Rubinstein-Taybi Syndrome |
| HSBHLH | TWIST1 | Saethre-Chotzen Syndrome |
| F00367 | EIF2B1 | Childhood Ataxia with Central Nervous System |
| | | Hypomyelination/Vanishing White Matter |
| Z20030 | EIF2B2 | Childhood Ataxia with Central Nervous System |
| | | Hypomyelination/Vanishing White Matter |
| Z41323 | EIF2B3 | Childhood Ataxia with Central Nervous System |
| | | Hypomyelination/Vanishing White Matter |
| Z17882 | EIF2B4 | Childhood Ataxia with Central Nervous System |
| | | Hypomyelination/Vanishing White Matter |
| R13846 | EIF2B5 | Childhood Ataxia with Central Nervous System |
| | | Hypomyelination/Vanishing White Matter; Cree |
| | | Leukoencephalopathy |
| T03917 | HEXB | Sandhoff Disease |
| HUMSRYA | SRY | XX Male Syndrome; XY Gonadal Dysgenesis |
| HUMSCAD | ACADS | Short Chain Acyl-CoA Dehydrogenase Deficiency |
| HSALAS2R | ALAS2 | Sideroblastic Anemia, X-Linked |
| T47846 | GPC3 | Simpson-Golabi-Behmel Syndrome |
| T11069 | GUSB | Mucopolysaccharidosis Type VII |
| T08813 | SPG3A | Hereditary Spastic Paraplegia, Dominant; SPG 3 |
| Z40639 | SPG3A | Hereditary Spastic Paraplegia, Dominant; SPG 3 |
| M77964 | SPG4 | Hereditary Spastic Paraplegia, Dominant; SPG 4 |
| N36808 | SMN1 | Spinal Muscular Atrophy |
| Z38265 | SMN1 | Spinal Muscular Atrophy |
| T06490 | SCA1 | Spinocerebellar Ataxia Type 1 |
| T55469 | SCA2 | Spinocerebellar Ataxia Type 2 |
| Z41764 | SCA2 | Spinocerebellar Ataxia Type 2 |
| T61453 | MJD | Spinocerebellar Ataxia Type 3 |
| HUMELASF | ELN | Cutis Laxa, Autosomal Dominant; Supravalvular |
| | | Aortic Stenosis |
| T05970 | HEXA | Hexosaminidase A Deficiency |
| M79184 | THRB | Thyroid Hormone Resistance |
| Z20729 | TCOF1 | Treacher Collins Syndrome |
| R48739 | TRPS1 | Trichorhinophalangeal Syndrome Type I |
| T77655 | TSC1 | Tuberous Sclerosis 1; Tuberous Sclerosis Complex |
| M78940 | TSC2 | Tuberous Sclerosis 2; Tuberous Sclerosis Complex |
| HSFAA | FAH | Tyrosinemia Type I |
| T39510 | TBX3 | Ulnar-Mammary Syndrome |
| HUMM7AA | MYO7A | Usher Syndrome Type 1 |
| W22160 | USH1C | Usher Syndrome Type 1 |
| T08506 | ACADVL | Very Long Chain Acyl-CoA Dehydrogenase |
| | | Deficiency |
| HUMHIPLIND | VHL | Von Hippel-Lindau Syndrome |
| HUMVWF | VWF | Von Willebrand Disease |
| HSU02368 | PAX3 | Waardenburg Syndrome Type I |
| H80461 | WRN | Werner Syndrome |
| HUMWND | ATP7B | Wilson Disease |
| T40645 | WAS | WAS-Related Disorders |
| HSLAL | LIPA | Wolman Disease |
| HSASL1 | ASL | Argininosuccinicaciduria |
| HSAGAGENE | AGA | Aspartylglycosaminuria |
| T88756 | ATD | Asphyxiating Thoracic Dystrophy |
| Z19164 | ASAH | Farber Disease |
| HUMALD | FBP1 | Fructose 1,6 Bisphosphatase Deficiency |
| HSLDHAR | LDHA | Lactate Dehydrogenase Deficiency |
| M77886 | LDHB | Lactate Dehydrogenase Deficiency |
| HSU13680 | LDHC | Lactate Dehydrogenase Deficiency |
| Z46189 | MAN2B1 | Alpha-Mannosidosis |
| M79249 | MANBA | Beta-Mannosidosis |
| H26723 | GALNS | Mucopolysaccharidosis Type IVA |
| H23053 | SLC26A4 | DFNB 4; Enlarged Vestibular Aqueduct Syndrome; |
| | | Nonsyndromic Hearing Loss and Deafness, Autosomal |
| | | Recessive; Pendred Syndrome |
| HSPGK1 | PGK1 | Phosphoglycerate Kinase Deficiency |
| HSU08818 | MET | Papillary Renal Carcinoma |
| M79231 | PRCC | Papillary Renal Carcinoma |
| T08200 | GNS | Mucopolysaccharidosis Type IIID |
| HUMNAGB | NAGA | Schindler Disease |
| T08881 | NEU1 | Mucolipidosis I |
| R81783 | SLC17A5 | Free Sialic Acid Storage Disorders |
| HUMAUTONH | MTATP6 | Mitochondrial Disorders; Mitochondrial DNA- |
| | | Associated Leigh Syndrome and NARP |
| F09306 | SCA7 | Spinocerebellar Ataxia Type 7 |
| AF248482 | DAZ | Y Chromosome Infertility |
| HSU21663 | DAZ | Y Chromosome Infertility |
| T47024 | JAG1 | Alagille Syndrome |
| HSRYRRM1 | RBMY1A1 | Y Chromosome Infertility |
| HSRYRRM2 | RBMY1A1 | Y Chromosome Infertility |
| HSVD3R | VDR | Osteoporosis; Rickets-Alopecia Syndrome |
| T40157 | FMO3 | Trimethylaminuria |
| HUMPHOSLIP | PPGB | Galactosialidosis |
| HUMPPR | PPGB | Galactosialidosis |
| H22222 | FANCC | Fanconi Anemia |
| D12009 | RPS6KA3 | Coffin-Lowry Syndrome |
| M78282 | PTEN | PTEN Hamartoma Tumor Syndrome (PHTS) |
| M78802 | FY | Duffy Antigen Genotyping |
| HSU04270 | KCNH2 | LQT 2; Romano-Ward Syndrome |
| T19733 | SCN5A | Brugada Syndrome; LQT 3; Romano-Ward Syndrome |
| HSTFIIDX | TBP | Spinocerebellar Ataxia Type17 |
| HUMKCHA | KCNA1 | Episodic Ataxia Type 1 |
| HSU78110 | NRTN | Hirschsprung Disease |
| HSET3AA | EDN3 | Hirschsprung Disease |
| Z17351 | ECE1 | Hirschsprung Disease |
| T47284 | DHCR7 | Smith-Lemli-Opitz Syndrome |
| HUMXIHB | HBZ | Alpha-Thalassemia |
| HSCP2 | CP | Aceruloplasminemia |
| N25320 | CLN6 | CLN6-Related Neuronal Ceroid-Lipofuscinosis; |
| | | Neuronal Ceroid-Lipofuscinoses |
| T11340 | NBS1 | Nijmegen Breakage Syndrome |
| Z40114 | NBS1 | Nijmegen Breakage Syndrome |
| HSU03688 | CYP1B1 | Glaucoma, Recessive (Congenital); Peters Anomaly |
| D62980 | MYOC | Glaucoma, Dominant (Juvenile Onset) |
| T98453 | NAGLU | Mucopolysaccharidosis Type IIIB |
| AA779817 | RUNX2 | Cleidocranial Dysplasia |
| HUMCBFA | RUNX2 | Cleidocranial Dysplasia |
| HSMARENO | MEFV | Familial Mediterranean Fever |
| F02180 | PHKB | Phosphorylase Kinase Deficiency of Liver and Muscle |
| D11905 | HPS1 | Hermansky-Pudlak Syndrome; Hermansky-Pudlak |
| | | Syndrome 1 |
| R95987 | CRX | Retinitis Pigmentosa, Autosomal Dominant |
| T05762 | EVC | Ellis-van Creveld Syndrome |
| T12126 | FLNA | Frontometaphyseal Dysplasia; Melnick-Needles |
| | | Syndrome; Otopalatodigital Syndrome; Periventricular |
| | | Heterotopia, X-Linked |
| T60913 | EBP | Chondrodysplasia Punctata, X-Linked Dominant |
| HSHNF4 | HNF4A | Maturity-Onset Diabetes of the Young Type I |
| HUMBGLUKIN | GCK | Familial Hyperinsulinism; GCK-Related |
| | | Hyperinsulinism; Maturity-Onset Diabetes of the |
| | | Young Type II |
| M62026 | GCK | Familial Hyperinsulinism; GCK-Related |
| | | Hyperinsulinism; Maturity-Onset Diabetes of the |
| | | Young Type II |
| R94860 | CIAS1 | Chronic Infantile Neurological Cutaneous and Articular |
| | | Syndrome; Familial Cold Urticaria; Muckle-Wells |
| | | Syndrome |
| T08221 | SMARCAL1 | Schimke Immunoosseous Dysplasia |
| T95621 | SLC25A15 | Hyperornithinemia-Hyperammonemia- |
| | | Homocitrullinuria Syndrome |
| HUMOATC | OAT | Ornithine Aminotransferase Deficiency |
| R08989 | MLYCD | Malonyl-CoA Decarboxylase Deficiency |
| T20008 | PMM2 | Congenital Disorders of Glycosylation |
| HSRPMI | MPI | Congenital Disorders of Glycosylation |
| HSSRECV6 | MGAT2 | Congenital Disorders of Glycosylation |
| T91755 | MGAT2 | Congenital Disorders of Glycosylation |
| HSCPTI | CPT1A | Carnitine Palmitoyltransferase IA (liver) Deficiency |
| HUMCPT | CPT2 | Carnitine Palmitoyltransferase II Deficiency |
| HSA1ATCA | SERPINA1 | Alpha-1-Antitrypsin Deficiency |
| N36808 | SMN2 | Spinal Muscular Atrophy |
| Z38265 | SMN2 | Spinal Muscular Atrophy |
| HUMACADL | ACADL | Long Chain Acyl-CoA Dehydrogenase Deficiency |
| Z25247 | CACT | Carnitine-Acylcarnitine Translocase Deficiency |
| HUMETFA | ETFA | Glutaricacidemia Type 2 |
| HSETFBS | ETFB | Glutaricacidemia Type 2 |
| S69232 | ETFDH | Glutaricacidemia Type 2 |
| T09377 | MEB | Muscle-Eye-Brain Disease |
| Z40427 | G6PT1 | Glycogen Storage DiseaseType Ib |
| AI002801 | SLC14A1 | Kidd Genotyping |
| Z19313 | SLC14A1 | Kidd Genotyping |
| HUMPGAMM | PGAM2 | Phosphoglycerate Mutase Deficiency |
| H86930 | MPP4 | Retinitis Pigmentosa, Autosomal Recessive |
| HSU14910 | RGR | Retinitis Pigmentosa, Autosomal Recessive |
| AA775466 | CARD15 | Crohn Disease |
| AA306952 | GAN | Giant Axonal Neuropathy |
| T99245 | CLCN5 | Dent Disease |
| T23537 | NR3C2 | Pseudohypoaldosteronism Type 1, Dominant |
| HSLASNA | SCNN1A | Pseudohypoaldosteronism Type 1, Recessive |
| H26938 | SCNN1B | Pseudoaldosteronism; Pseudohypoaldosteronism Type |
| | | 1, Recessive |
| HUMGAMM | SCNN1G | Pseudoaldosteronism; Pseudohypoaldosteronism Type |
| | | 1, Recessive |
| HSP450AL | CYP11B2 | Familial Hyperaldosteronism Type 1; Familial |
| | | Hypoaldosteronism Type 2 |
| HUMCYPADA | CYP11B1 | Familial Hyperaldosteronism Type 1 |
| AF017089 | COL11A1 | Stickler Syndrome; Stickler Syndrome Type II |
| HUMCA1XIA | COL11A1 | Stickler Syndrome; Stickler Syndrome Type II |
| HUMA2XICOL | COL11A2 | Stickler Syndrome |
| S61523 | PIGA | Paroxysmal Nocturnal Hemoglobinuria |
| T58881 | PHKA2 | Glycogen Storage Disease Type IX |
| Z39614 | DHAPAT | Rhizomelic Chondrodysplasia Punctata Type 2 |
| N89899 | SH2D1A | Lymphoproliferative Disease, X-Linked |
| HUMUGT1FA | UGT1A1 | Gilbert Syndrome |
| HUMNC1A | COL7A1 | Epidermolysis Bullosa Dystrophica, Bart Type; |
| | | Epidermolysis Bullosa Dystrophica, Cockayne- |
| | | Touraine Type; Epidermolysis Bullosa Dystrophica, |
| | | Hallopeau-Siemens Type; Epidermolysis Bullosa |
| | | Dystrophica, Pasini Type; Epidermolysis Bullosa, |
| | | Pretibial. |
| T49684 | ITGB4 | Epidermolysis Bullosa Letalis with Pyloric Atresia |
| S66196 | ITGA6 | Epidermolysis Bullosa Letalis with Pyloric Atresia |
| T10988 | LAMC2 | Epidermolysis Bullosa Junctional, Herlitz-Pearson |
| | | Type |
| HUMLAMAA | LAMA3 | Epidermolysis Bullosa Junctional, Herlitz-Pearson |
| | | Type |
| Z24848 | LAMA3 | Epidermolysis Bullosa Junctional, Herlitz-Pearson |
| | | Type |
| T10484 | LAMB3 | Epidermolysis Bullosa Junctional, Disentis Type; |
| | | Epidermolysis Bullosa Junctional, Herlitz-Pearson |
| | | Type |
| HUMBP180AA | COL17A1 | Epidermolysis Bullosa Junctional, Disentis Type |
| M78889 | PLEC1 | Epidermolysis Bullosa with Muscular Dystrophy |
| Z38659 | SLC22A5 | Carnitine Deficiency, Systemic |
| T85099 | CTNS | Cystinosis |
| W27253 | CNGA3 | Achromatopsia; Achromatopsia 2 |
| HSU66088 | SLC5A5 | Thyroid Hormonogenesis Defect I |
| HUMTEKRPTK | TEK | Venous Malformation, Multiple Cutaneous and |
| | | Mucosal |
| R69741 | SLC26A2 | Achondrogenesis Type 1B; Atelosteogenesis Type 2; |
| | | Diastrophic Dysplasia; Multiple Epiphyseal Dysplasia, |
| | | Recessive |
| Z46092 | PEX10 | Zellweger Syndrome Spectrum |
| S55790 | COL4A3 | Alport Syndrome; Alport Syndrome, Autosomal |
| | | Recessive |
| HSCOL4A4 | COL4A4 | Alport Syndrome; Alport Syndrome, Autosomal |
| | | Recessive |
| T10559 | SHFM3 | Ectrodactyly |
| T93670 | FANCA | Fanconi Anemia |
| H47777 | FANCB | Fanconi Anemia |
| AA542822 | FANCE | Fanconi Anemia |
| HUMPSPB | PSAP | Metachromatic Leukodystrophy |
| HUMSAPA1 | PSAP | Metachromatic Leukodystrophy |
| S69686 | PSAP | Metachromatic Leukodystrophy |
| AA252786 | NCF1 | Chronic Granulomatous Disease |
| HUMNCF1A | NCF1 | Chronic Granulomatous Disease |
| HSTGFB1 | TGFB1 | Camurati-Engelmann Disease |
| R24242 | CYBA | Chronic Granulomatous Disease |
| HUMLNOXF | NCF2 | Chronic Granulomatous Disease |
| S41458 | PDE6B | Retinitis Pigmentosa, Autosomal Recessive |
| R21727 | DYSF | Dysferlinopathy; Limb-Girdle Muscular Dystrophies, |
| | | Autosomal Recessive |
| AF055580 | USH2A | Usher Syndrome Type 2; Usher Syndrome Type 2A |
| N36632 | MITF | Waardenburg Syndrome Type II; Waardenburg |
| | | Syndrome Type IIA |
| M78027 | MYH9 | DFNA 17; Epstein Syndrome; Fechtner Syndrome; |
| | | May-Hegglin Anomaly; Sebastian Syndrome |
| Z40194 | HPS4 | Hermansky-Pudlak Syndrome |
| AA333774 | GP1BA | Platelet Antigen Genotyping |
| M79110 | GP1BB | Platelet Antigen Genotyping |
| HUMGPIIBA | ITGA2B | Platelet Antigen Genotyping |
| T29174 | ITGA2 | Glycoprotein 1a Deficiency; Platelet Antigen |
| | | Genotyping |
| HSGST4 | GSTM1 | Lung Cancer |
| AA338271 | CHEK2 | Li-Fraumeni Syndrome |
| T78869 | CHEK2 | Li-Fraumeni Syndrome |
| T03839 | SH3BP2 | Cherubism |
| T67412 | IRF6 | IRF6-Related Disorders |
| AB037973 | FGF23 | Hypophosphatemic Rickets, Dominant |
| T60199 | FBLN5 | Cutis Laxa, Autosomal Recessive |
| T03890 | ARX | ARX-Related Disorders |
| M79175 | NSD1 | Sotos Syndrome |
| T07860 | NSD1 | Sotos Syndrome |
| M79181 | COH1 | Cohen Syndrome |
| MIHS75KDA | NDUFS1 | Leigh Syndrome (nuclear DNA mutation); |
| | | Mitochondrial Respiratory Chain Complex I |
| | | Deficiency |
| T09312 | NDUFV1 | Leigh Syndrome (nuclear DNA mutation); |
| | | Mitochondrial Respiratory Chain Complex I |
| | | Deficiency |
| AA399371 | SALL4 | Acrorenoocular Syndrome; Okihiro Syndrome |
| HUMA8SEQ | TIMP3 | Pseudoinflammatory Fundus Dystrophy |
| Z40623 | GDAP1 | Charcot-Marie-Tooth Neuropathy Type 4; Charcot- |
| | | Marie-Tooth Neuropathy Type 4A |
| AA128030 | FOXL2 | Blepharophimosis, Epicanthus Inversus, Ptosis |
| HUMCRTR | SLC6A8 | Creatine Deficiency Syndrome, X-Linked |
| T08882 | JPH3 | Huntington Disease-Like 2 |
| T07283 | SNRPN | Autistic Disorder; Pervasive, Developmental Disorders |
| Z38837 | SPR | Sepiapterin Reductase Deficiency (SR) |
| HUMANTIR | AGTR1 | Angiotensin II Receptor, Type 1 |
| T46961 | SEPN1 | Congenital Muscular Dystrophy with Early Spine |
| | | Rigidity; Multiminicore Disease |
| Z43954 | TRIM32 | Limb-Girdle Muscular Dystrophies, Autosomal |
| | | Recessive |
| Z19219 | TTID | Limb-Girdle Muscular Dystrophies, Autosomal |
| | | Dominant |
| HSECADH | CDH1 | Hereditary Diffuse Gastric Cancer |
| Z41199 | WFS1 | Nonsyndromic Low-Frequency Sensorineural Hearing |
| | | Loss; Wolfram Syndrome |
| HUMLORAA | LOR | Progressive Symmetric Erythrokeratoderma |
| Z38324 | HR | Alopecia Universalis; Papular Atrichia |
| T09039 | RYR1 | Central Core Disease of Muscle; Malignant |
| | | Hyperthermia Susceptibility; Multiminicore Disease |
| T10442 | GALE | Galactose Epimerase Deficiency |
| D82541 | PDB2 | Paget Disease of Bone |
| HSU20759 | CASR | Autosomal Dominant Hypocalcemia; Familial |
| | | Hypocalciuric Hypercalcemia, Type I; Familial |
| | | Isolated Hypoparathyroidism; Neonatal Severe Primary |
| | | Hyperparathyroidism |
| AA071082 | SALL1 | Townes-Brocks Syndrome |
| T81692 | EDAR | Hypohidrotic Ectodermal Dysplasia; Hypohidrotic |
| | | Ectodermal Dysplasia, Autosomal |
| HUMHPA1B | HP | Anhaptoglobinemia |
| HSU01922 | TIMM8A | Deafness-Dystonia-Optic Neuronopathy Syndrome |
| HUMHSDI | HSD3B2 | Prostate Cancer |
| HSU05659 | HSD17B3 | Prostate Cancer |
| Z38915 | NPHP4 | Nephronophthisis 4; Senior-Loken Syndrome |
| HSC1INHR | SERPING1 | Hereditary Angioneurotic Edema |
| D62739 | BBS7 | Bardet-Biedl Syndrome |
| T64266 | SLC7A7 | Lysinuric Protein Intolerance |
| S52028 | CTH | Cystathioninuria |
| Z30254 | EFEMP1 | Doyne Honeycomb Retinal Dystrophy; Patterned |
| | | Dystrophy of Retinal Pigment Epithelium |
| D59254 | ELOVL4 | Stargardt Disease 3 |
| S43856 | GCH1 | Dopa-Responsive Dystonia; GTP Cyclohydrolase 1- |
| | | Deficient DRD; GTP Cyclohydrolase-1 Deficiency |
| | | (GTPCH) |
| M78468 | PAFAH1B1 | 17-Linked Lissencephaly |
| M78473 | PAFAH1B1 | 17-Linked Lissencephaly |
| S51033 | MID1 | Opitz Syndrome, X-Linked |
| Z40343 | MID1 | Opitz Syndrome, X-Linked |
| HUM6PTHS | PTS | Pyruvoyltetrahydropterin Synthase Deficiency |
| M62103 | CIRH1A | North American Indian Childhood Cirrhosis |
| HSDHPR | QDPR | Dihydropteridine Reductase Deficiency (DHPR) |
| T23665 | FKRP | Congenital Muscular Dystrophy Type 1C; Limb-Girdle |
| | | Muscular Dystrophies, Autosomal Recessive |
| T60498 | LRPPRC | Leigh Syndrome, French-Canadian Type |
| HSACHRA | CHRNA1 | Congenital Myasthenic Syndromes |
| HSACHRB | CHRNB1 | Congenital Myasthenic Syndromes |
| HSACHRG | CHRND | Congenital Myasthenic Syndromes |
| HSACETR | CHRNE | Congenital Myasthenic Syndromes |
| HSACRAP | RAPSN | Congenital Myasthenic Syndromes |
| M78334 | COLQ | Congenital Myasthenic Syndromes |
| S56138 | CHAT | Congenital Myasthenic Syndromes |
| D11584 | SDHC | Familial Nonchromaffin Paragangliomas |
| HSPSTI | SPINK1 | Hereditary Pancreatitis |
| HSSPROTR | PROS1 | Protein S Heerlen Variant |
| HUMLAP | ITGB2 | Leukocyte Adhesion Deficiency, Type 1 |
| T12572 | ADAMTS13 | Familial Thrombotic Thrombocytopenia Purpura |
| HUMCOMIIP | SDHB | Carotid Body Tumors and Multiple Extraadrenal |
| | | Pheochromocytomas |
| NM005912 | MC4R | Obesity |
| HUMPAX8A | PAX8 | Congenital Hypothyroidism |
| AA037119 | FOXE1 | Bamforth-Lazarus Syndrome; Congenital |
| | | Hypothyroidism |
| AV754057 | FSHB | Isolated Follicle Stimulating Hormone Deficiency |
| HUMHOMEOA | PCBD | Pterin-4a Carbinolamine Dehydratase Deficiency |
| | | (PCD) |
| HSTHR | TH | Dopa-Responsive Dystonia; Tyrosine Hydroxylase- |
| | | Deficient DRD |
| AA219596 | ZIC3 | Heterotaxy Syndrome |
| HSU20324 | CSRP3 | Dilated Cardiomyopathy |
| HUMPHLAM | PLN | Dilated Cardiomyopathy |
| F10219 | ALMS1 | Alstrom Syndrome |
| T06612 | VCL | Dilated Cardiomyopathy |
| AF388366 | USH3A | Usher Syndrome Type 3 |
| Z40797 | SGCE | Myoclonus-Dystonia |
| T08448 | RAB7 | Charcot-Marie-Tooth Neuropathy Type 2 |
| D12383 | GARS | Charcot-Marie-Tooth Neuropathy Type 2 |
| Z36734 | HRPT2 | HRPT2-Related Disorders |
| H19914 | EDARADD | Hypohidrotic Ectodermal Dysplasia; Hypohidrotic |
| | | Ectodermal Dysplasia, Autosomal |
| T08852 | PPT1 | Neuronal, Ceroid-Lipofuscinoses; PPT1-Related |
| | | Neuronal Ceroid-Lipofuscinosis |
| HUMDRA | SLC26A3 | Familial Chloride Diarrhea |
| R16324 | AGPAT2 | Berardinelli-Seip Congenital Lipodystrophy |
| Z38569 | BSCL2 | Berardinelli-Seip Congenital Lipodystrophy |
| W28410 | OPN1MW | Blue-Mono-Cone-Monochromatic Type Colorblindness |
| T27896 | OPN1LW | Blue-Mono-Cone-Monochromatic Type Colorblindness |
| AI469991 | PHOX2A | Congenital Fibrosis of Extraocular Muscles |
| HSFSTHR | FSHR | Premature Ovarian Failure, Autosomal Recessive |
| HSLPH | LCT | Hypolactasia, Adult Type |
| Z41000 | BCS1L | Gracile Syndrome; Mitochondrial Respiratory Chain |
| | | Complex III Deficiency |
| HSCGJP | GJA1 | Oculodentodigital Dysplasia |
| HSPERFP1 | PRF1 | Familial Hemophagocytic Lymphohistiocytosis 2 |
| M78112 | GLUD1 | Familial Hyperinsulinism; GLUD1-Related |
| | | Hyperinsulinism |
| W79230 | RAX | Anophthalmia |
| AF041339 | PITX3 | Anophthalmia |
| AA151708 | HESX1 | Anophthalmia |
| HSSOXB | SOX3 | Anophthalmia; Mental Retardation, X-Linked, with |
| | | Growth Hormone Deficiency |
| HUMHMGBOX | SOX2 | Anophthalmia |
| HSGM2APA | GM2A | GM2 Activator Deficiency |
| Z19280 | GLC1E | Glaucoma, Dominant (Adult Onset) |
| T20165 | PHF6 | Borjeson-Forssman-Lehmann Syndrome |
| Z40394 | CMT4B2 | Charcot-Marie-Tooth Neuropathy Type 4 |
| HUMIHH | IHH | Brachydactyly Type A1 |
| HUMCDPK | CDK4 | Familial Malignant Melanoma |
| T39355 | SBDS | Shwachman-Diamond Syndrome |
| HSHMPLK | MPL | Amegakaryocytic Thrombocytopenia, Congenital |
| Z38860 | TRIM37 | Mulibrey Nanism |
| M62027 | DTNA | Familial Isolated Noncompaction of Left Ventrical |
| | | Myocardium |
| Z39175 | DDB2 | Xeroderma Pigmentosum |
| T09329 | MUTYH | MYH-Associated Polyposis |
| HUMAPA | APP | Alzheimer Disease Type 1; Early-Onset Familial |
| | | Alzheimer Disease |
| M79090 | GSS | 5-Oxoprolinuria |
| Z26981 | OXCT | 3-Oxoacid CoA Transferase |
| D12046 | PMS1 | Hereditary Non-Polyposis Colon Cancer |
| T08186 | PMS2 | Hereditary Non-Polyposis Colon Cancer |
| R00471 | MSH6 | Hereditary Non-Polyposis Colon Cancer |
| T60457 | NDUFS4 | Leigh Syndrome (nuclear DNA mutation); |
| | | Mitochondrial Respiratory Chain Complex I |
| | | Deficiency |
| D30864 | NDUFS8 | Leigh Syndrome (nuclear DNA mutation) |
| M78107 | SDHA | Leigh Syndrome (nuclear DNA mutation) |
| R15290 | NTDUFS7 | Leigh Syndrome (nuclear DNA mutation) |
| HUMPCBA | PC | Pyruvate Carboxylase Deficiency |
| W32719 | AASS | Hyperlysinemia |
| T23789 | PEX3 | Zellweger Syndrome Spectrum |
| T09086 | STK11 | Peutz-Jeghers Syndrome |
| T87335 | HAL | Histidmemia |
| Z19082 | ALDH4A1 | Hyperprolinemia, Type II |
| Z25227 | MADH4 | Juvenile Polyposis Syndrome |
| M78130 | XPB | Xeroderma Pigmentosum |
| T08987 | XPD | Xeroderma Pigmentosum |
| D81449 | XPF | Xeroderma Pigmentosum |
| HSXPGAA | XPG | Xeroderma Pigmentosum |
| HSAUHMR | AUH | 3-Methylglutaconic Aciduria Type 1 |
| T19530 | MMAB | Methylmalonicaciduria |
| Z40169 | MMAA | Methylmalonicaciduria |
| T93695 | BCAT1 | Hyperleucine-Isoleucinemia |
| Z41266 | BCAT2 | Hyperleucine-Isoleucinemia |
| HSU03506 | SLC1A1 | Dicarboxylicaminoaciduria |
| R88591 | PRODH | Hyperprolinemia, Type I |
| T05380 | EPM2A | Progressive Myoclonus Epilepsy, Lafora Type |
| T27227 | FANCF | Fanconi Anemia |
| Z41736 | FANCG | Fanconi Anemia |
| R66178 | ED4 | Ectodermal Dysplasia, Margarita Island Type |
| L25197 | KCNE1 | Jervell and Lange-Nielsen Syndrome; LQT 5; Romano- |
| | | Ward Syndrome |
| HUMUMOD | UMOD | Familial Nephropathy with Gout; Medullary Cystic |
| | | Kidney Disease 2 |
| HSU66583 | CRYGD | Cataract, Crystalline Aculeiform |
| HSPHR | PTHR1 | Chondrodysplasia, Blomstrand Type |
| T97980 | MTRR | Homocystinuria-Megaloblastic Anemia |
| S60710 | ADSL | Adenylosuccinase deficiency |
| Z38216 | SLC25A19 | Amish Lethal Microcephaly |
| T11501 | DBH | Dopamine Beta-Hydroxylase Deficiency |
| H11439 | NLGN3 | Autistic Disorder; Pervasive Developmental Disorders |
| R12551 | NLGN4 | Autistic Disorder; Pervasive Developmental Disorders |
| M78212 | ATP1A2 | Familial Hemiplegic Migraine |
| T96957 | SPCH1 | Severe Speech Delay |
| AI266171 | PHOX2B | Congenital Central Hypoventilation Syndrome |
| BG723199 | DSG4 | Localized Autosomal Recessive Hypotrichosis |
| T46918 | HSD11B2 | Apparent Mineralocorticoid Excess Syndrome |
| HUMFERLS | FTL | Hyperferritinemia Cataract Syndrome |
| HUMCKRASA | KRAS2 | Familial Pancreatic Cancer |
| S39383 | PTPN11 | LEOPARD Syndrome; Noonan Syndrome |
| HUMSTAR | STAR | Cholesterol Desmolase Deficiency |
| Z20453 | STAR | Cholesterol Desmolase Deficiency |
| HUMVPC | AVP | Neurohypophyseal Diabetes Insipidus |
| M62144 | MECP2 | Rett Syndrome |
| HSCA2VR | COL5A2 | Ehlers-Danlos Syndrome, Classic Type |
| HUMGENX | TNXB | Ehlers-Danlos-like Syndrome Due to Tenascin-X |
| | | Deficiency |
| R02385 | TNXB | Ehlers-Danlos-like Syndrome Due to Tenascin-X |
| | | Deficiency |
| T39901 | LITAF | Charcot-Marie-Tooth Neuropathy Type 1 |
| AA621310 | FOXE3 | Anophthalmia |
| H18132 | CFC1 | Heterotaxy Syndrome |
| R36719 | EBAF | Heterotaxy Syndrome |
| HSACTIIRE | ACVR2B | Heterotaxy Syndrome |
| T52017 | CRELD1 | Heterotaxy Syndrome |
| D11851 | LMNA | Dilated Cardiomyopathy; Emery-Dreifuss Muscular |
| | | Dystrophy, Autosomal Dominant; Familial Partial |
| | | Lipodystrophy, Dunnigan Type; Hutchinson-Gilford |
| | | Progeria Syndrome; Limb-Girdle Muscular |
| | | Dystrophies, Autosomal Dominant; Mandibuloacral |
| | | Dysplasia |
| D12062 | DSP | Cardiomyopathy, Dilated, with Woolly Hair and |
| | | Keratoderma; Keratosis Palmoplantaris Striata |
| H99382 | MSH3 | Hereditary Non-Polyposis Colon Cancer |
| AW205295 | NOG | Multiple Synostoses Syndrome |
| AA135181 | GJB3 | Erythrokeratodermia Variabilis |
| F10278 | PEO1 | Mitochondrial DNA Deletion Syndromes |
| M62022 | MASS1 | Febrile Seizures |
| Z42549 | UQCRB | Mitochondrial Respiratory Chain Complex III |
| | | Deficiency |
| HUMEGR2A | EGR2 | Charcot-Marie-Tooth Neuropathy Type 1; Charcot- |
| | | Marie-Tooth Neuropathy Type 1D; Charcot-Marie- |
| | | Tooth Neuropathy Type 4; Charcot-Marie-Tooth |
| | | Neuropathy Type 4E |
| HSFLT4X | FLT4 | Milroy Congenital Lymphedema |
| Z28459 | PEX26 | Zellweger Syndrome Spectrum |
| HUMRPS24A | RPS19 | Diamond-Blackfan Anemia |
| T11633 | RPS19 | Diamond-Blackfan Anemia |
| HSACMHCP | MYH7 | Dilated Cardiomyopathy; Familial Hypertrophic |
| | | Cardiomyopathy |
| Z25920 | TNNT2 | Dilated Cardiomyopathy; Familial Hypertrophic |
| | | Cardiomyopathy |
| HUMTRO | TPM1 | Dilated Cardiomyopathy; Familial Hypertrophic |
| | | Cardiomyopathy |
| Z18303 | MYBPC3 | Dilated Cardiomyopathy; Familial Hypertrophic |
| | | Cardiomyopathy |
| H5U09466 | COX10 | Leigh Syndrome (nuclear DNA mutation) |
| S72487 | ECGF1 | Mitochondrial Neurogastrointestinal Encephalopathy |
| | | Syndrome |
| M62196 | KIF5A | Hereditary Spastic Paraplegia, Dominant |
| T07578 | KIF5A | Hereditary Spastic Paraplegia, Dominant |
| D11648 | HSPD1 | Hereditary Spastic Paraplegia, Dominant |
| T47330 | SOX18 | Hypotrichosis-Lymphedema-Telangiectasia Syndrome |
| AA448334 | CAV3 | Caveolinopathy; Limb-Girdle Muscular Dystrophies, |
| | | Autosomal Dominant |
| AW071529 | ALX4 | Parietal Foramina 2 |
| M61973 | CD2AP | Focal Segmental Glomerulosclerosis |
| W21801 | NR2E3 | Enhanced S-Cone Syndrome |
| Z20305 | TREM2 | PLOSL |
| T05421 | ANK2 | LQT 4; Romano-Ward Syndrome |
| HUMROR2A | ROR2 | ROR2-Related Disorders |
| Z25920 | CMD1D | Dilated Cardiomyopathy |
| AA887962 | HLXB9 | Currarino Syndrome |
| R00281 | ALDH5A1 | Succinic Semialdehyde Dehydrogenase Deficiency |
| HSPCCAR | PCCA | Propionic Acidemia |
| N43992 | DLL3 | Spondylocostal Dysostosis, Autosomal Recessive; |
| | | Syndactyly, Type IV |
| Z39790 | MUT | Methylmalonicaciduria |
| HUMARGL | ARG1 | Argininemia |
| HUMRENBAT | SLC3A1 | Cystinuria |
| T80665 | SLC7A9 | Cystinuria |
| T27286 | HGD | Alkaptonuria |
| HUMBCKDH | BCKDHA | Maple Syrup Urine Disease |
| HUMBCKDHA | BCKDHB | Maple Syrup Urine Disease |
| HSTRANSP | DBT | Maple Syrup Urine Disease |
| Z44722 | HLCS | Holocarboxylase Synthetase Deficiency |
| Z38396 | BTD | Biotinidase Deficiency |
| T48178 | POMT1 | Walker-Warburg Syndrome |
| T28737 | GJB2 | DFNA 3 Nonsyndromic Hearing Loss and Deafness; |
| | | DFNB 1 Nonsyndromic Hearing Loss and Deafness; |
| | | GJB2-Related DFNA 3 Nonsyndromic Hearing Loss |
| | | and Deafness; GJB2-Related DFNB 1 Nonsyndromic |
| | | Hearing Loss and Deafness; Nonsyndromic Hearing |
| | | Loss and Deafness, Autosomal Dominant; |
| | | Nonsyndromic Hearing Loss and Deafness, Autosomal |
| | | Recessive; Vohwinkel Syndrome |
| T05861 | COCH | DFNA 9 (COCH); Nonsyndromic Hearing Loss and |
| | | Deafness, Autosomal Dominant |
| HSBRN4 | POU3F4 | DFN 3 |
| HSU21938 | TTPA | Ataxia with Vitamin E Deficiency (AVED) |
| T93783 | KIAA1985 | Charcot-Marie-Tooth Neuropathy Type 4 |
| BE735997 | SANS | Usher Syndrome Type 1 |
| AA548783 | HOXD13 | Syndactyly, Type II |
| R33750 | HOXA13 | Hand-Foot-Uterus Syndrome |
| HUMPP | GLDC | GLDC-Related Glycine Encephalopathy; Glycine |
| | | Encephalopathy |
| F04230 | AMT | AMT-Related Glycine Encephalopathy; Glycine |
| | | Encephalopathy |
| T54795 | DECR | 2,4-Dienoyl-CoA Reductase Deficiency |
| R07295 | ACAT1 | Ketothiolase Deficiency |
| S70578 | ACAT1 | Ketothiolase Deficiency |
| HUMMEVKIN | MVK | Hyper IgD Syndrome; Mevalonicaciduria |
| T11245 | HMGCL | 3-Hydroxy-3-Methylglutaryl-Coenzyme A Lyase |
| | | Deficiency |
| Z41427 | GCDH | Glutaricacidemia Type 1 |
| HSSHOXA | SHOX | Langer Mesomelic Dwarfism; Leri-Weill |
| | | Dyschondrosteosis; Short Stature |
| HUMDOPADC | DDC | Aromatic L-Amino Acid Decarboxylase Deficiency |
| HSCOL3A4 | COL6A3 | Limb-Girdle Muscular Dystrophies, Autosomal |
| | | Dominant |
| HSCOL1A4 | COL6A1 | Limb-Girdle Muscular Dystrophies, Autosomal |
| | | Dominant |
| HSCOL2C2 | COL6A2 | Limb-Girdle Muscular Dystrophies, Autosomal |
| | | Dominant |
| H16770 | RECQL4 | Rothmund-Thomson Syndrome |
| H11473 | SGSH | Mucopolysaccharidosis Type IIIA |
| H67137 | MCCC1 | 3-Methylcrotonyl-CoA Carboxylase Deficiency |
| R88931 | MCCC2 | 3-Methylcrotonyl-CoA Carboxylase Deficiency |
| Z24865 | TCAP | Dilated Cardiomyopathy; Limb-Girdle Muscular |
| | | Dystrophies, Autosomal Recessive |
| M86030 | DCX | DCX-Related Malformations |
| HUMACTASK | ACTA1 | Nemaline Myopathy |
| HSDGIGLY | DSG1 | Keratosis Palmoplantaris Striata |
| HSRETSA | SAG | Retinitis Pigmentosa, Autosomal Recessive |
| HSAPHOL | ALPL | Hypophosphatasia |
| N73784 | XPA | Xeroderma Pigmentosum |
| T28958 | XPC | Xeroderma Pigmentosum |
| N69543 | POLH | Xeroderma Pigmentosum |
| T54103 | POLH | Xeroderma Pigmentosum |
| H56484 | CKN1 | Cockayne Syndrome |
| Z38185 | ERCC6 | Cockayne Syndrome |
| F07041 | PI12 | Familial Encephalopathy with Neuroserpin Inclusion |
| | | Bodies |
| AA633404 | KCNE2 | LQT 6; Romano-Ward Syndrome |
| HSTITINC2 | CMD1G | Dilated Cardiomyopathy |
| N99115 | NPHP1 | Nephronophthisis 1; Senior-Loken Syndrome |
| HUMELANAA | ELA2 | ELA2-Related Neutropenia |
| S67325 | PCCB | Propionic Acidemia |
| HSGA7331 | M1S1 | Corneal Dystrophy, Gelatinous Drop-Like |
| HSACE | ACE | Angiotensin I Converting Enzyme 1 |
| S49816 | TSHR | Congenital Hypothyroidism; Familial Non- |
| | | Autoimmune Hyperthyroidism |
| Z30221 | VMGLOM | Multiple Glomus Tumors |
| H88042 | COL9A3 | Multiple Epiphyseal Dysplasia, Dominant |
| M78119 | ADA | Adenosine Deaminase Deficiency |
| T55785 | GAMT | Guanidinoacetate Methyltransferase Deficiency |
| HUMCST4BA | CSTB | Myoclonic Epilepsy of Unverricht and Lundborg |
| S73196 | AQP2 | Nephrogenic Diabetes Insipidus; Nephrogenic Diabetes |
| | | Insipidus, Autosomal |
| HSU76388 | NR5A1 | XY Sex Reversal with Adrenal Failure |
| HSCPHC22 | MTRNR1 | MTRNR1-Related Hearing Loss and Deafness |
| H21596 | PPARG | Diabetes Mellitus with Acanthosis Nigricans and |
| | | Hypertension |
| D56550 | FOXC1 | Anophthalmia; Rieger Syndrome |
| M78868 | AP3B1 | Hermansky-Pudlak Syndrome |
| T47068 | NOTCH3 | CADASIL |
| HSHMF1C | TCF1 | Maturity-Onset Diabetes of the Young Type III |
| AF049893 | IPF1 | Maturity-Onset Diabetes of the Young Type IV |
| HSU30329 | IPF1 | Maturity-Onset Diabetes of the Young Type IV |
| HSVHNF1 | TCF2 | Maturity-Onset Diabetes of the Young Type V |
| HUMLDLRFMT | LDLR | Familial Hypercholesterolemia |
| HSAPOBR2 | APOB | Familial Hypercholesterolemia Type B |
| T78010 | ABCB7 | Sideroblastic Anemia and Ataxia |
| AF076215 | PROP1 | PROP1-Related Combined Pituitary Hormone |
| | | Deficiency |
| S99468 | ALAD | Acute Hepatic Porphyria |
| T61818 | ABCC2 | Dubin-Johnson Syndrome |
| HUMLCAT | LCAT | Lecithin Cholesterol Acyltransferase Deficiency |
| Z38510 | HADHSC | Short Chain 3-Hydroxyacyl-CoA Dehydrogenase |
| | | Deficiency, Liver |
| AF041240 | PPOX | Variegate Porphyria |
| T77011 | PPOX | Variegate Porphyria |
| Z40014 | ALDH10 | Sjogren-Larsson Syndrome |
| S79867 | KRT16 | Nonepidermolytic Palmoplantar Hyperkeratosis; |
| | | Pachyonychia Congenita |
| HUMKER56K | KRT6A | Pachyonychia Congenita |
| HSKERELP | KRT17 | Pachyonychia Congenita; Steatocystoma Multiplex |
| R11850 | KRT6B | Pachyonychia Congenita |
| S69510 | KRT9 | Epidermolytic Palmoplantar Keratoderma |
| HSCYTK | KRT13 | White Sponge Nevus of Cannon |
| T92918 | KRT4 | White Sponge Nevus of Cannon |
| S54769 | SPG7 | Hereditary Spastic Paraplegia, Recessive; SPG 7 |
| T50707 | FECH | Erythropoietic Protoporphyria |
| HUMPOMM | PXMP3 | Zellweger Syndrome Spectrum |
| R05392 | PEX6 | Zellweger Syndrome Spectrum |
| Z38759 | PEX12 | Zellweger Syndrome Spectrum |
| R14480 | PEX16 | Zellweger Syndrome Spectrum |
| R10031 | PEX13 | Zellweger Syndrome Spectrum |
| R13532 | PXF | Zellweger Syndrome Spectrum |
| Z30136 | AGPS | Rhizomelic Chondrodysplasia Punctata Type 3 |
| HSU07866 | ACOX | Pseudoneonatal Adrenoleukodystrophy |
| N63143 | ALG6 | Congenital Disorders of Glycosylation |
| HSTNFR1A | TNFRSF1A | Familial Hibernian Fever |
| AA018811 | RP1 | Retinitis Pigmentosa, Autosomal Dominant |
| HSG11 | RP1 | Retinitis Pigmentosa, Autosomal Dominant |
| T07942 | RP1 | Retinitis Pigmentosa, Autosomal Dominant |
| H28658 | PRPF31 | Retinitis Pigmentosa, Autosomal Dominant |
| T07062 | PRPF8 | Retinitis Pigmentosa, Autosomal Dominant |
| T05573 | RP18 | Retinitis Pigmentosa, Autosomal Dominant |
| HUMNRLGP | NRL | Retinitis Pigmentosa, Autosomal Dominant |
| T87786 | CRB1 | Retinitis Pigmentosa, Autosomal Recessive |
| H92408 | TULP1 | Retinitis Pigmentosa, Autosomal Recessive |
| S42457 | CNGA1 | Retinitis Pigmentosa, Autosomal Recessive |
| H30568 | PDE6A | Retinitis Pigmentosa, Autosomal Recessive |
| M78192 | RLBP1 | Retinitis Pigmentosa, Autosomal Recessive; Retinitis |
| | | Pigmentosa, Autosomal Recessive, Bothnia Type |
| T10761 | SLC4A4 | Proximal Renal Tubular Acidosis with Ocular |
| | | Abnormalities |
| N64339 | GJB6 | DFNA 3 Nonsyndromic Hearing Loss and Deafness; |
| | | DFNB 1 Nonsyndromic Hearing Loss and Deafness; |
| | | GJB6-Related DFNB 1 Nonsyndromic Hearing Loss |
| | | and Deafness; GJB6-Related DFNA 3 Nonsyndromic |
| | | Hearing Loss and Deafness; Hidrotic Ectodermal |
| | | Dysplasia 2; Nonsyndromic Hearing Loss and |
| | | Deafness, Autosomal Dominant; Nonsyndromic |
| | | Hearing Loss and Deafness, Autosomal Recessive |
| T67968 | MAT1A | Isolated Persistent Hypermethioninemia |
| HUMUMPS | UMPS | Oroticaciduria |
| HSPNP | NP | Purine Nucleoside Phosphorylase Deficiency |
| AB006682 | AIRE | Autoimmune Polyendocrinopathy Syndrome Type 1 |
| BE871354 | JUP | Naxos Disease |
| T08214 | JUP | Naxos Disease |
| F00120 | DES | Dilated Cardiomyopathy |
| R28506 | MOCS1 | Molybdenum Cofactor Deficiency |
| T70309 | MOCS2 | Molybdenum Cofactor Deficiency |
| T08212 | SNCA | Parkinson Disease |
| R99091 | ABCC6 | Pseudoxanthoma Elasticum |
| T69749 | ABCC6 | Pseudoxanthoma Elasticum |
| AA207040 | PRG4 | Arthropathy Camptodactyly Syndrome |
| T07189 | PRG4 | Arthropathy Camptodactyly Syndrome |
| F07016 | OPPG | Osteoporosis Pseudoglioma Syndrome |
| H27782 | SCO2 | Fatal Infantile Cardioencephalopathy due to COX |
| | | Deficiency |
| S54705S1 | PRKAR1A | Carney Complex |
| Z25903 | SCA10 | Spinocerebellar Ataxia Type10 |
| AA592984 | WISP3 | Progressive Pseudorheumatoid Arthropathy of |
| | | Childhood |
| Z39666 | MCOLN1 | Mucolipidosis IV |
| HSEMX2 | EMX2 | Familial Schizencephaly |
| HUMSP18A | SFTPB | Pulmonary Surfactant Protein B Deficiency |
| T10596 | ATP8B1 | Benign Recurrent Intrahepatic Cholestasis; Progressive |
| | | Familial Intrahepatic Cholestasis; Progressive Familial |
| | | Intrahepatic Cholestasis 1 |
| U46845 | CYP27B1 | Pseudovitamin D Deficiency Rickets |
| Z21585 | MAPT | Frontotemporal Dementia with Parkinsonism-17 |
| HSPPD | HPD | Tyrosinemia Type III |
| HUMUGT1FA | UGT1A | Crigler-Najjar Syndrome |
| R20880 | SLC19A2 | Thiamine-Responsive Megaloblastic Anemia |
| | | Syndrome |
| H42203 | TFAP2B | Char Syndrome |
| Z30126 | RYR2 | Catecholaminergic Ventricular Tachycardia, |
| | | Autosomal Dominant |
| HSSPYRAT | AGXT | Hyperoxaluria, Primary, Type 1 |
| T80758 | SEDL | Spondyloepiphyseal Dysplasia Tarda, X-Linked |
| T89449 | SEDL | Spondyloepiphyseal Dysplasia Tarda, X-Linked |
| AA373083 | FOXC2 | Lymphedema with Distichiasis |
| HUMPROP2AB | SCA12 | Spinocerebellar Ataxia Type12 |
| Z30145 | ACTC | Dilated Cardiomyopathy |
| HS1900 | GDNF | Hirschsprung Disease |
| M62223 | NEFL | Charcot-Marie-Tooth Neuropathy Type 1F/2E; |
| | | Charcot-Marie-Tooth Neuropathy Type 2; Charcot- |
| | | Marie-Tooth Neuropathy Type 2E/1F |
| T10920 | SERPINE1 | Plasminogen Activator Inhibitor I |
| HSNCAML1 | L1CAM | Hereditary Spastic Paraplegia, X-Linked; L1 |
| | | Syndrome |
| T11074 | L1CAM | Hereditary Spastic Paraplegia, X-Linked; L1 Syndrome |
| HUMHPROT | GCSH | Glycine Encephalopathy |
| HSTATR | TAT | Tyrosinemia Type II |
| Z19514 | CPT1B | Carnitine Palmitoyltransferase IB (muscle) Deficiency |
| HSALK3A | BMPR1A | Juvenile Polyposis Syndrome |
| T78581 | CLN5 | CLN5-Related Neuronal Ceroid-Lipofuscinosis; |
| | | Neuronal Ceroid-Lipofuscinoses |
| N32269 | CLN8 | CLN8-Related Neuronal Ceroid-Lipofuscinosis; |
| | | Neuronal Ceroid-Lipofuscinoses |
| HSU44128 | SLC12A3 | Gitelman Syndrome |
| AI590292 | NPHS2 | Focal Segmental Glomerulosclerosis; Steroid-Resistant |
| | | Nephrotic Syndrome |
| M62209 | ACTN4 | Focal Segmental Glomerulosclerosis |
| H53423 | CNGB3 | Achromatopsia; Achromatopsia 3 |
| HSEPAR | HCI | Hemangioma, Hereditary |
| R14741 | ZIC2 | Holoprosencephaly 5 |
| H84264 | SIX3 | Anophthalmia; Holoprosencephaly 2 |
| T10497 | TGIF | Holoprosencephaly 4 |
| Z30052 | USP9Y | Y Chromosome Infertility |
| N85185 | DBY | Y Chromosome Infertility |
| T11164 | SPTLC1 | Hereditary Sensory Neuropathy Type I |
| T68440 | GNE | GNE-Related Myopathies; Sialuria, French Type |
| HSPROPERD | PFC | Properdin Deficiency, X-Linked |
| T46865 | SURF1 | Leigh Syndrome (nuclear DNA mutation) |
| AI015025 | VAX1 | Anophthalmia |
| BM727523 | VAX1 | Anophthalmia |
| AA310724 | SIX6 | Anophthalmia |
| R37821 | TP63 | TP63-Related Disorders |
| AF091582 | ABCB11 | Progressive Familial Intrahepatic Cholestasis |
| HUMHOX7 | MSX1 | Hypodontia, Autosomal Dominant; Tooth-and-Nail |
| | | Syndrome |
| R15034 | CACNB4 | Episodic Ataxia Type 2 |
| T52100 | TYROBP | PLOSL |
| F09012 | MTMR2 | Charcot-Marie-Tooth Neuropathy Type 4 |
| T08510 | APTX | Ataxia with Oculomotor Apraxia; Ataxia with |
| | | Oculomotor Apraxia 1 |
| HUMHAAC | HF1 | Hemolytic-Uremic Syndrome |
| C16899 | MTND5 | Leber Hereditary Optic Neuropathy; Mitochondrial |
| | | DNA-Associated Leigh Syndrome and NARP |

[0793] #DRUG_DRUG_INTERACTION: refers to proteins involved in a biological process which mediates the interaction between at least two consumed drugs. Novel splice variants of known protein is involved in interaction between drugs may be used, for example, to modulate such drug-drug interactions. Examples of proteins involved in drug-drug interactions are presented in Table 7 together with the corresponding internal gene contig name, enabling to allocate the new splice variants within the data files “proteins.fasta” and “transcripts.fasta” in the attached CD-ROM1 and “proteins” and “transcripts” files in the attached CD-ROM2.

TABLE 7

| Contig | Gene Symbol | Description |
|---|---|---|
| HUMANTLA | SLC3A2 | 4f2 cell-surface antigen heavy chain |
| Z43093 | HTR6 | 5-hydroxytryptamine 6 receptor |
| HSXLALDA | ABCD1 | Adrenoleukodystrophy protein |
| R35137 | GPT | Alanine aminotransferase |
| D11683 | ALDH1 | Aldehyde dehydrogenase, cytosolic |
| T53833 | AOX1 | Aldehyde oxidase |
| HUMAGP1A | ORM1 | Alpha-1-acid glycoprotein 1 |
| HUMAGP1A | ORM2 | Alpha-1-acid glycoprotein 2 |
| HUMABPA | ABP1 | Amiloride-sensitive amine oxidase [copper-containing] |
| S62734 | MAOB | Amine oxidase [flavin-containing] b |
| AA526963 | SLC6A14 | Amino acid transporter b0+ |
| HSAE2 | SLC4A2 | Anion exchange protein 2 |
| M78110 | SLC4A3 | Anion exchange protein 3 |
| M78052 | ABCB2 | Antigen peptide transporter 1 |
| HUMMHCIIAB | ABCB3 | Antigen peptide transporter 2 |
| F02693 | APOD | Apolipoprotein d |
| M62234 | ASNA1 | Arsenical pump-driving ATPase |
| HUMNORTR | NAT1 | Arylamine n-acetyltransferase 1 |
| T67129 | NAT1 | Arylamine n-acetyltransferase 1 |
| AI262683 | NAT2 | Arylamine n-acetyltransferase 2 |
| Z39550 | ABCB9 | ATP-binding cassette protein abcb9 |
| Z44377 | ABCA1 | ATP-binding cassette, sub-family a, member 1 |
| M78056 | ABCA2 | ATP-binding cassette, sub-family a, member 2 |
| M85498 | ABCA3 | ATP-binding cassette, sub-family a, member 3 |
| T79973 | ABCB6 | ATP-binding cassette, sub-family b, member 6, mitochondrial |
| T78010 | ABCB7 | ATP-binding cassette, sub-family b, member 7, mitochondrial |
| R89046 | ABCB8 | ATP-binding cassette, sub-family b, member 8, mitochondrial |
| H64439 | ABCD2 | ATP-binding cassette, sub-family d, member 2 |
| M85760 | ABCD3 | ATP-binding cassette, sub-family d, member 3 |
| Z21904 | ABCD4 | ATP-binding cassette, sub-family d, member 4 |
| Z39977 | ABCG1 | ATP-binding cassette, sub-family g, member 1 |
| Z45628 | ABCG2 | ATP-binding cassette, sub-family g, member 2 |
| T80665 | SLC7A9 | B(0, +)-type amino acid transporter 1 |
| AF091582 | ABCB11 | Bile salt export pump |
| Z38696 | BLMH | Bleomycin hydrolase |
| T08127 | BNPI | Brain-specific na-dependent inorganic phosphate cotransporter |
| F00545 | SLC12A2 | Bumetanide-sensitive sodium-(potassium)-chloride cotransporter 2 |
| HSU07969 | CDH17 | Cadherin-17 |
| T10238 | SLC25A12 | Calcium-binding mitochondrial carrier protein aralar1 |
| Z40674 | SLC25A13 | Calcium-binding mitochondrial carrier protein aralar2 |
| T61818 | ABCC2 | Canalicular multispecific organic anion transporter 1 |
| T39953 | ABCC3 | Canalicular multispecific organic anion transporter 2 |
| HUMCRE | CBR1 | Carbonyl reductase [nadph] 1 |
| AA320697 | CBR3 | Carbonyl reductase [nadph] 3 |
| F03362 | COMT | Catechol o-methyltransferase, membrane-bound form |
| T11004 | COMT | Catechol o-methyltransferase, membrane-bound form |
| T39368 | SLC7A4 | Cationic amino acid transporter-4 |
| S74445 | RBP5 | Cellular retinol-binding protein iii |
| T55952 | RBP5 | Cellular retinol-binding protein iii |
| HSU39905 | SLC18A1 | Chromaffin granule amine transporter |
| R52371 | SLC35A1 | Cmp-sialic acid transporter |
| D20754 | CNT3 | Concentrative nucleoside transporter 3 |
| HSMNKMBP | ATP7A | Copper-transporting ATPase 1 |
| HUMWND | ATP7B | Copper-transporting ATPase 2 |
| HUMCFTRM | ABCC7 | Cystic fibrosis transmembrane conductance regulator |
| F10774 | SLC7A11 | Cystine/glutamate transporter |
| HUMCYPADA | CYP11B1 | Cytochrome P450 11B1, mitochondrial |
| HUMARM | CYP19 | Cytochrome P450 19 |
| HUMCYP145 | CYP1A1 | Cytochrome P450 1A1 |
| R21282 | CYP26 | Cytochrome P450 26 |
| AF209774 | CYP2A13 | Cytochrome P450 2A13 |
| HSC45B2C | CYP2A6 | Cytochrome P450 2A6 |
| HSC45B2C | CYP2A7 | Cytochrome P450 2A7 |
| HSP452B6 | CYP2B6 | Cytochrome P450 2B6 |
| HUM2C18 | CYP2C18 | Cytochrome P450 2C18 |
| HSCP450 | CYP2C19 | Cytochrome P450 2C19 |
| HUM2C18 | CYP2C19 | Cytochrome P450 2C19 |
| HUMCYPAX | CYP2C8 | Cytochrome P450 2C8 |
| HSCP450 | CYP2C9 | Cytochrome P450 2C9 |
| HSP450 | CYP2D6 | Cytochrome P450 2D6 |
| M77918 | CYP2E1 | Cytochrome P450 2E1 |
| HUMCYPIIF | CYP2F1 | Cytochrome P450 2F1 |
| H09076 | CYP2J2 | Cytochrome P450 2J2 |
| R07010 | CYP39A1 | Cytochrome P450 39A1 |
| HUMCYPHLP | CYP3A3 | Cytochrome P450 3A3 |
| HUMCYPHLP | CYP3A4 | Cytochrome P450 3A4 |
| AA416822 | CYP3A43 | Cytochrome P450 3A43 |
| HUMCYP3A | CYP3A5 | Cytochrome P450 3A5 |
| T82801 | CYP3A7 | Cytochrome P450 3A7 |
| HSCYP4AA | CYP4A11 | Cytochrome P450 4A11 |
| S67580 | CYP4A11 | Cytochrome P450 4A11 |
| HUMCP45IV | CYP4B1 | Cytochrome P450 4B1 |
| T98002 | CYP4F12 | Cytochrome P450 4F12 |
| AA377259 | CYP4F2 | Cytochrome P450 4F2 |
| AI400898 | CYP4F8 | Cytochrome P450 4F8 |
| HSU09178 | DPYD | Dihydropyrimidine dehydrogenase [nadp+] |
| W03174 | DPYD | Dihydropyrimidine dehydrogenase [nadp+] |
| HUMFMO1 | FMO1 | Dimethylaniline monooxygenase [n-oxide forming] 1 |
| HSFLMON2R | FMO2 | Dimethylaniline monooxygenase [n-oxide forming] 2 |
| T64494 | FMO2 | Dimethylaniline monooxygenase [n-oxide forming] 2 |
| T40157 | FMO3 | Dimethylaniline monooxygenase [n-oxide forming] 3 |
| HSFLMON2R | FMO4 | Dimethylaniline monooxygenase [n-oxide forming] 4 |
| D12220 | FMO5 | Dimethylaniline monooxygenase [n-oxide forming] 5 |
| H25503 | HET | Efflux transporter like protein |
| T12485 | HET | Efflux transporter like protein |
| M78151 | EPHX1 | Epoxide hydrolase 1 |
| T66884 | SLC29A1 | Equilibrative nucleoside transporter 1 |
| HSHNP36 | SLC29A2 | Equilibrative nucleoside transporter 2 |
| T08444 | SLC1A3 | Excitatory amino acid transporter 1 |
| HSU01824 | SLC1A2 | Excitatory amino acid transporter 2 |
| HSU03506 | SLC1A1 | Excitatory amino acid transporter 3 |
| F07883 | SLC1A6 | Excitatory amino acid transporter 4 |
| N39099 | SLC1A7 | Excitatory amino acid transporter 5 |
| F00548 | SLC2A9 | Facilitative glucose transporter family member glut9 |
| T95337 | SLC27A1 | Fatty acid transport protein |
| Z44099 | SLC27A1 | Fatty acid transport protein |
| HUMALBP | FABP4 | Fatty acid-binding protein, adipocyte |
| S67314 | FABP3 | Fatty acid-binding protein, heart |
| AW605378 | FABP2 | Fatty acid-binding protein, intestinal |
| L25227 | SLC19A1 | Folate transporter 1 |
| HSI15PGN1 | FABP6 | Gastrotropin |
| Z40427 | G6PT1 | Glucose 5-phosphate transporter |
| D11793 | SLC2A1 | Glucose-transporter type 1, erythrocyte/brain |
| N27535 | SLC2A10 | Glucose transporter type 10 |
| T52633 | SLC2A11 | Glucose transporter type 11 |
| HUMLGTPA | SLC2A2 | Glucose transporter type 2, liver |
| HUMLGTPA | SLC2A2 | Glucose transporter type 2, liver |
| T07239 | SLC2A3 | Glucose transporter type 3, brain |
| HUMIRGT | SLC2A4 | Glucose transporter type 4, insulin-responsive |
| M62105 | SLC2A5 | Glucose transporter type 5, small intestine |
| T59518 | SLC2A8 | Glucose transporter type 8 |
| HUMLGTH1 | GSTA1 | Glutathione s-transferase a1 |
| HUMLGTH1 | GSTA2 | Glutathione s-transferase a2 |
| T98291 | GSTA3 | Glutathione s-transferase a3-3 |
| Z21581 | GSTA4 | Glutathione s-transferase a4-4 |
| HSGST4 | GSTM1 | Glutathione s-transferase mu 1 |
| D31291 | GSTM2 | Glutathione s-transferase mu 2 |
| HSGST4 | GSTM2 | Glutathione s-transferase mu 2 |
| T08311 | GSTM3 | Glutathione s-transferase mu 3 |
| HUMGSTM4B | GSTM4 | Glutathione s-transferase mu 4 |
| HUMGSTM5 | GSTM5 | Glutathione s-transferase mu 5 |
| T05391 | GSTP1 | Glutathione s-transferase p |
| Z32822 | GSTT1 | Glutathione s-transferase theta 1 |
| R08187 | GSTT2 | Glutathione s-transferase theta 2 |
| Z25318 | GSTK1 | Glutathione s-transferase, mitochondrial |
| H03163 | SLC37A1 | Glycerol-3-phosphate transporter |
| AA363955 | SLC5A7 | High affinity choline transporter |
| HSRRMRNA | SLC7A1 | High-affinity cationic amino acid transporter-1 |
| R22196 | SLC31A1 | High-affinity copper uptake protein 1 |
| AA918012 | SLC10A2 | Ileal sodium/bile acid transporter |
| F00840 | SLC7A5 | Large neutral amino acid transporter small subunit 1 |
| M79133 | SLC7A5 | Large neutral amino acid transporter small subunit 1 |
| Z38621 | SLC7A8 | Large neutral amino acids transporter small subunit 2 |
| HUMCARAA | CES1 | Liver carboxylesterase |
| S52379 | CES1 | Liver carboxylesterase |
| T55488 | SLC21A6 | Liver-specific organic anion transporter |
| W78748 | SLC5A4 | Low affinity sodium-glucose cotransporter |
| T54842 | SLC7A2 | Low-affinity cationic amino acid transporter-2 |
| T87799 | ABCA7 | Macrophage abc transporter |
| Z17844 | LRP | Major vault protein |
| Z24885 | GSTZ1 | Maleylacetoacetate isomerase |
| T39939 | MT1A | Metallothionein-IA |
| R99207 | MT1B | Metallothionein-IB |
| T39939 | MT1E | Metallothionein-IE |
| D11725 | MT1F | Metallothionein-IF |
| S68949 | MT1G | Metallothionein-IG |
| S68954 | MT1G | Metallothionein-IG |
| HSFMET | MT1H | Metallothionein-IH |
| S52379 | MT2A | Metallothionein-II |
| M78846 | MT3 | Metallothionein-III |
| AA570216 | MT1K | Metallothionein-IK |
| S68954 | MT1K | Metallothionein-IK |
| D11725 | MT1L | Metallothionein-IL |
| HSPP15 | MT1L | Metallothionein-IL |
| HSPP15 | MT1R | Metallothionein-IR |
| NM032935 | MT4 | Metallothionein-IV |
| HUMGST | MGST1 | Microsomal glutathione s-transferase 1 |
| H59104 | MGST2 | Microsomal glutathione s-transferase 2 |
| T47062 | MGST3 | Microsomal glutathione s-transferase 3 |
| SSMPCP | SLC25A3 | Mitochondrial phosphate carrier protein |
| H39996 | SULT1A3 | Monoamine-sulfating phenol sulfotransferase |
| HUMARYTRAB | SULT1A3 | Monoamine-sulfating phenol sulfotransferase |
| M62141 | SLC16A1 | Monocarboxylate transporter 1 |
| H90048 | SLC16A6 | Monocarboxylate transporter 2 |
| F02520 | SLC16A2 | Monocarboxylate transporter 3 |
| AI005004 | SLC16A8 | Monocarboxylate transporter 4 |
| T59354 | SLC16A3 | Monocarboxylate transporter 5 |
| R22416 | SLC16A4 | Monocarboxylate transporter 6 |
| T78890 | SLC16A5 | Monocarboxylate transporter 7 |
| F01173 | SLC16A7 | Monocarboxylate transporter 8 |
| Z41819 | ABCB1 | Multidrug resistance protein 1 |
| HUMMDR3 | ABCB4 | Multidrug resistance protein 3 |
| SATHRMRP | ABCC1 | Multidrug resistance-associated protein 1 |
| R00050 | ABCC4 | Multidrug resistance-associated protein 4 |
| M78673 | ABCC5 | Multidrug resistance-associated protein 5 |
| R99091 | ABCC6 | Multidrug resistance-associated protein 6 |
| T69749 | ABCC6 | Multidrug resistance-associated protein 6 |
| D11495 | DIA4 | Nad(p)h dehydrogenase [quinone] 1 |
| HUMNRAMP | SLC11A1 | Natural resistance-associated macrophage protein 1 |
| Z38360 | SLC11A2 | Natural resistance-associated macrophage protein 2 |
| HUMASCT1A | SLC1A4 | Neutral amino acid transporter a |
| T10696 | SLC1A5 | Neutral amino acid transporter b(0) |
| HUMRENBAT | SLC3A1 | Neutral and basic amino acid transport protein rbat |
| HSU08021 | NNMT | Nicotinamide n-methyltransferase |
| T87759 | SLC22A4 | Novel organic cation transporter 1 |
| Z41935 | SLC15A2 | Oligopeptide transporter, kidney isoform |
| HSU21936 | SLC15A1 | Oligopeptide transporter, small intestine isoform |
| M62053 | OAT1 | Organic anion transporter 1 |
| H18607 | OAT3 | Organic anion transporter 3 |
| R16970 | OAT4 | Organic anion transporter 4 |
| T39111 | SLC21A9 | Organic anion transporter b |
| Z41576 | SLC21A11 | Organic anion transporter oATP-d |
| T23657 | SLC21A12 | Organic anion transporter oATP-e |
| Z21041 | SLC21A14 | Organic anion transporting polypeptide 14 |
| H75435 | SLC21A8 | Organic anion transporting polypeptide 8 |
| HSU77086 | SLC22A1 | Organic cation transporter 1 |
| HSOCTK | SLC22A2 | Organic cation transporter 2 |
| T53187 | SLC22A3 | Organic cation transporter 3 |
| H30224 | ORCTL4 | Organic cation transporter like 4 |
| H25503 | ORCTL2 | Organic cation transporter-like 2 |
| Z38659 | SLC22A5 | Organic cation/carnitine transporter 2 |
| AB010438 | ORCTL3 | Organic-cation transporter like 3 |
| T95621 | ORNT1 | Ornithine transporter |
| AA398593 | ORNT2 | Ornithine transporter 2 |
| R79412 | NTT5 | Orphan sodium- and chloride-dependent neurotransmitter |
| | | transporter ntt5 |
| H82347 | NTT73 | Orphan sodium- and chloride-dependent neurotransmitter |
| | | transporter ntt73 |
| Z43484 | NTT73 | Orphan sodium- and chloride-dependent neurotransmitter |
| | | transporter ntt73 |
| Z44749 | SLC25A17 | Peroxisomal membrane protein pmp34 |
| HUMARYLSUL | SULT1A1 | Phenol-sulfating phenol sulfotransferase 1 |
| HUMARYLSUL | SULT1A2 | Phenol-sulfating phenol sulfotransferase 2 |
| D12243 | RBP4 | Plasma retinol-binding protein |
| HUMATPAD | ATP12A | Potassium-transporting ATPase alpha chain 2 |
| Z40030 | ATP8A1 | Potential phospholipid-transporting ATPase ia |
| T10596 | FIC1 | Potential phospholipid-transporting ATPase ic |
| T86800 | SLC31A2 | Probable low-affinity copper uptake protein 2 |
| Z41717 | PTGIS | Prostacyclin synthase |
| S78220 | PTGS1 | Prostaglandin g/h synthase 1 |
| HUMENDOSYN | PTGS2 | Prostaglandin g/h synthase 2 |
| T85296 | SLC21A2 | Prostaglandin transporter |
| M62053 | SLC22A6 | Renal organic anion transport protein 1 |
| HSU26209 | SLC13A2 | Renal sodium/dicarboxylate cotransporter |
| Z40774 | SLC13A2 | Renal sodium/dicarboxylate cotransporter |
| HSNAPI1 | SLC17A1 | Renal sodium-dependent phosphate transport protein 1 |
| HUMNAPI3X | SLC34A1 | Renal sodium-dependent phosphate transport protein 2 |
| H85361 | ABCA4 | Retinal-specific ATP-binding cassette transporter |
| S74445 | CRABP1 | Retinoic acid-binding protein i, cellular |
| HUMCRABP | CRABP2 | Retinoic acid-binding protein ii, cellular |
| HUMCRBP | RBP1 | Retinol-binding protein i, cellular |
| S57153 | RBP1 | Retinol-binding protein i, cellular |
| T07054 | RBP2 | Retinol-binding protein ii, cellular |
| T63266 | RBP2 | Retinol-binding protein ii, cellular |
| HUMBGT1R | SLC6A12 | Sodium- and chloride-dependent betaine transporter |
| HUMCRTR | SLC6A8 | Sodium- and chloride-dependent creatine transporter 1 |
| R20043 | SLC6A13 | Sodium- and chloride-dependent gaba transporter 2 |
| S70609 | SLC6A9 | Sodium- and chloride-dependent glycine transporter 1 |
| AA625644 | SLC6A5 | Sodium- and chloride-dependent glycine transporter 2 |
| M78677 | SLC6A6 | Sodium- and chloride-dependent taurine transporter |
| T10761 | SLC4A4 | Sodium bicarbonate cotransporter nbc1 |
| AA452802 | NBC4 | Sodium bicarbonate cotransporter nbc4a |
| HUMCNC | SLC8A1 | Sodium/calcium exchanger 1 |
| R20720 | SLC8A2 | Sodium/calcium exchanger 2 |
| T07666 | SLC8A3 | Sodium/calcium exchanger 3 |
| T07666 | SLC8A3 | Sodium/glucose cotransporter 1 |
| HUMSGLCT | SLC5A2 | Sodium/glucose cotransporter 2 |
| S83549 | SLC9A2 | Sodium/hydrogen exchanger 2 |
| HSU66088 | SLC5A5 | Sodium/iodide cotransporter |
| HSU62966 | SLC28A1 | Sodium/nucleoside cotransporter 1 |
| AA358822 | SLC28A2 | Sodium/nucleoside cotransporter 2 |
| HUMNTCP | SLC10A1 | Sodium/taurocholate cotransporting polypeptide |
| HSGAT1MR | SLC6A1 | Sodium-and chloride-dependent gaba transporter 1 |
| F05686 | SLC6A11 | Sodium-and chloride-dependent gaba transporter 3 |
| AA604857 | SVCT1 | Sodium-denpendent vitamin c transporter 1 |
| T27309 | SVCT2 | Sodium-denpendent vitamin c transporter 2 |
| S44626 | SLC6A3 | Sodium-dependent dopamine transporter |
| Z39412 | NADC3 | Sodium-dependent high-affinity dicarboxylate transporter |
| T77525 | SLC5A6 | Sodium-dependent multivitamin transporter |
| HUMNORTR | SLC6A2 | Sodium-dependent noradrenaline transporter |
| HSZ83953 | SLC17A3 | Sodium-dependent phosphate transport protein 3 |
| R06460 | SLC17A3 | Sodium-dependent phosphate transport protein 3 |
| HSZ83953 | SLC17A4 | Sodium-dependent phosphate transport protein 4 |
| R09122 | SLC17A4 | Sodium-dependent phosphate transport protein 4 |
| H40741 | SLC6A7 | Sodium-dependent proline transporter |
| HSSERT | SLC6A4 | Sodium-dependent serotonin transporter |
| T64950 | SLC21A3 | Sodium-independent organic anion transporter |
| M79233 | EPHX2 | Soluble epoxide hydrolase |
| Z39813 | SLC25A18 | Solute carrier |
| HUMSTAR | STAR | Steroidogenic acute regulatory protein |
| Z20453 | STAR | Steroidogenic acute regulatory protein |
| R69741 | SLC26A2 | Sulfate transporter |
| T08860 | ABCC8 | Sulfonylurea receptor 1 |
| R73927 | ABCC9 | Sulfonylurea receptor 2 |
| T84623 | SULT1C1 | Sulfotransferase 1C1 |
| R58632 | SULT1C2 | Sulfotransferase 1C2 |
| HSVMT | SLC18A2 | Synaptic vesicle amine transporter |
| AF080246 | TRAG3 | Taxol resistant associated protein 3 |
| R20880 | SLC19A2 | Thiamine transporter 1 |
| HSU44128 | SLC12A3 | Thiazide-sensitive sodium-chloride cotransporter |
| S62904 | TPMT | Thiopurine s-methyltransferase |
| HSPBX2 | G17 | Transporter protein |
| T62038 | G17 | Transporter protein |
| R53836 | SLC35A3 | UDP n-acetylglucosamine transporter |
| T60594 | SLC35A2 | UDP-galactose translocator |
| HUMUGT1FA | UGT1 | UDP-glucuronosyltransferase 1-1, microsomal |
| HUMUGT1FA | UGT1A10 | UDP-glucuronosyltransferase 1A10 |
| HUMUGT1FA | UGT1A7 | UDP-glucuronosyltransferase 1A7 |
| HUMUGT1FA | UGT1A8 | UDP-glucuronosyltransferase 1A8 |
| HUMUGT1FA | UGT1A9 | UDP-glucuronosyltransferase 1A9 |
| HSUGT2BIO | UGT2B10 | UDP-glucuronosyltransferase 2B10, microsomal |
| HSUDPGT | UGT2B11 | UDP-glucuronosyltransferase 2B11, microsomal |
| N70316 | UGT2B11 | UDP-glucuronosyltransferase 2B11, microsomal |
| HSU08854 | UGT2B15 | UDP-glucuronosyltransferase 2B15, microsomal |
| T24450 | UGT2B17 | UDP-glucuronosyltransferase 2B17, microsomal |
| HSUDPGT | UGT2B4 | UDP-glucuronosyltransferase 2B4, microsomal |
| HUMUDPGTA | UGT2B7 | UDP-glucuronosyltransferase 2B7, microsomal |
| AI002801 | SLC14A1 | Urea transporter, erythrocyte |
| Z19313 | SLC14A1 | Urea transporter, erythrocyte |
| AI002801 | SLC14A2 | Urea transporter, kidney |
| HSU09210 | SLC18A3 | Vesicular acetylcholine transporter |
| HUMKCHB | KCNA4 | Voltage-gated potassium channel protein kv1.4 |
| R09608 | XDH | Xanthine dehydrogenase/oxidase |
| T64266 | SLC7A7 | Y + 1 amino acid transporter 1 |
| T10628 | SLC30A1 | Zinc transporter 1 |
| AA322641 | SLC30A4 | Zinc transporter 4 |

[0794] #EXONS_SKIPPED: This field details alternatively spliced exons identified according to the teachings of the present invention and their deletion to create the biomolecular sequences of the present invention. This field is marked by #EXONS_SKIPPED and thereafter the names of exons (for example: #EXONS_SKIPPED C15NT010194P1split49_{—}294009_{—}294072). C15NT010194P1split49_{—}294009_{—}294072 specifies the name of the exon of the present invention.

### Example 7

### Proteins and Diseases

[0795] The following sections list examples of proteins (subsection i), based on their molecular function, which participate in variety of diseases (listed in subsection ii), which diseases can be diagnosed/treated using the biomolecular sequences uncovered by the present invention.

[0796] The present invention is of biomolecular sequences, which can be classified to functional groups based on known activity of homologous sequences. This functional group classification, allows the identification of diseases and conditions, which may be diagnosed and treated based on the novel sequence information and annotations of the present invention.

[0797] This functional group classification includes the following groups:

[0798] Proteins Involved in Drug-Drug Interactions:

[0799] The phrase “proteins involved in drug-drug interactions” refers to proteins involved in a biological process which mediates the interaction between at least two consumed drugs.

[0800] Pharmaceutical compositions including such proteins or protein encoding sequences, antibodies directed against such proteins or polynucleotides capable of altering expression of such proteins, may be used to modulate drug-drug interactions. Antibodies and polynucleotides such as PCR primers and molecular probes designed to identify such proteins or protein encoding sequences may be used for diagnosis of such drug-drug interactions.

[0801] Examples of these conditions include, but are not limited to the cytochrom P450 protein family, which is involved in the metabolism of many drugs. Examples of proteins, which are involved in drug-drug interactions are presented in Table 7.

[0802] Proteins Involved in the Metabolism of a Pro-Drug to a Drug:

[0803] The phrase “proteins involved in the metabolism of a pro-drug to a drug” refers to proteins that activate an inactive pro-drug by chemically chaining it into a biologically active compound. Preferably, the metabolizing enzyme is expressed in the target tissue thus reducing systemic side effects.

[0804] Pharmaceutical compositions including such proteins or protein encoding sequences, antibodies directed against such proteins or polynucleotides capable of altering expression of such proteins, may be used to modulate the metabolism of a pro-drug into drug. Antibodies and polynucleotides such as PCR primers and molecular probes designed to identify such proteins or protein encoding sequences may be used for diagnosis of such conditions.

[0805] Examples of these proteins include, but are not limited to esterases hydrolyzing the cholesterol lowering drug simvastatin into its hydroxy acid active form.

[0806] MDR Proteins:

[0807] The phrase “MDR proteins” refers to Multi Drug Resistance proteins that are responsible for the resistance of a cell to a range of drugs, usually by exporting these drugs outside the cell. Preferably, the MDR proteins are ABC binding cassette proteins. Preferably, drug resistance is associated with resistance to chemotherapy.

[0808] Pharmaceutical compositions including such proteins or protein encoding sequences, antibodies directed against such proteins or polynucleotides capable of altering expression of such proteins, may be used to treat diseases in which the transport of molecules and macromolecules such as neurotransmitters, hormones, sugar etc. is abnormal leading to various pathologies. Antibodies and polynucleotides such as PCR primers and molecular probes designed to identify such proteins or protein encoding sequences may be used for diagnosis of such diseases.

[0809] Examples of these proteins include, but are not limited to the multi-drug resistant transporter MDR1/P-glycoprotein, the gene product of MDR1, which belongs to the ATP-binding cassette (ABC) superfamily of membrane transporters and increases the resistance of malignant cells to therapy by exporting the therapeutic agent out of the cell.

[0810] Hydrolases Acting on Amino Acids:

[0811] The phrase “hydrolases acting on amino acids” refers to hydrolases acting on a pair of amino acids.

[0812] Pharmaceutical compositions including such proteins or protein encoding sequences, antibodies directed against such proteins or polynucleotides capable of altering expression of such proteins, may be used to treat diseases in which the transfer of a glycosyl chemical group from one molecule to another is abnormal thus, a beneficial effect may be achieved by modulation of such reaction. Antibodies and polynucleotides such as PCR primers and molecular probes designed to identify such proteins or protein encoding sequences may be used for diagnosis of such diseases.

[0813] Examples of such diseases include, but are not limited to reperfusion of clotted blood vessels by TPA (Tissue Plasminogen Activator) which converts the abundant, but inactive, zymogen plasminogen to plasmin by hydrolyzing a single ARG-VAL bond in plasminogen.

[0814] Transaminases:

[0815] The term “transaminases” refers to enzymes transferring an amine group from one compound to another.

[0816] Pharmaceutical compositions including such proteins or protein encoding sequences, antibodies directed against such proteins or polynucleotides capable of altering expression of such proteins, may be used to treat diseases in which the transfer of an amine group from one molecule to another is abnormal thus, a beneficial effect may be achieved by modulation of such reaction. Antibodies and polynucleotides such as PCR primers and molecular probes designed to identify such proteins or protein encoding sequences may be used for diagnosis of such diseases.

[0817] Examples of such transaminases include, but are not limited to two liver enzymes, frequently used as markers for liver function—SGOT (Serum Glutamic-Oxalocetic Transaminase—AST) and SGPT (Serum Glutamic-Pyruvic Transaminase—ALT).

[0818] Immunoglobulins:

[0819] The term “immunoglobulins” refers to proteins that are involved in the immune and complement systems such as antigens and autoantigens, immunoglobulins, MHC and HLA proteins and their associated proteins.

[0820] Pharmaceutical compositions including such proteins or protein encoding sequences, antibodies directed against such proteins or polynucleotides capable of altering expression of such proteins, may be used to treat diseases involving the immune system such as inflammation, autoimmune diseases, infectious diseases, and cancerous processes. Antibodies and polynucleotides such as PCR primers and molecular probes designed to identify such proteins or protein encoding sequences may be used for diagnosis of such diseases.

[0821] Examples of such diseases and molecules that may be target for diagnostics include, but are not limited to members of the complement family such as C3 and C4 that their blood level is used for evaluation of autoimmune diseases and allergy state and C1 inhibitor that its absence is associated with angioedema. Thus, new variants of these genes are expected to be markers for similar events. Mutation in variants of the complement family may be associated with other immunological syndromes, such as increased bacterial infection that is associated with mutation in C3. C1 inhibitor was shown to provide safe and effective inhibition of complement activation after reperfused acute myocardial infarction and may reduce myocardial injury [Eur. Heart J. 2002, 23 (21):1670-7], thus its variant may have the same or improved effect.

[0822] Transcription Factor Binding:

[0823] The phrase “transcription factor binding” refers to proteins involved in transcription process by binding to nucleic acids, such as transcription factors, RNA and DNA binding proteins, zinc fingers, helicase, isomerase, histones, and nucleases.

[0824] Pharmaceutical compositions including such proteins or protein encoding sequences, antibodies directed against such proteins or polynucleotides capable of altering expression of such proteins may be used to treat diseases involving transcription factors binding proteins. Such treatment may be based on transcription factor that can be used to for modulation of gene expression associated with the disease. Antibodies and polynucleotides such as PCR primers and molecular probes designed to identify such proteins for protein encoding sequences may be used for diagnosis of such diseases.

[0825] Examples of such diseases include, but are not limited to breast cancer associated with ErbB-2 expression that was shown to be successfully modulated by a transcription factor [Proc. Natl. Acad. Sci. USA. 2000, 97(4):1495-500]. Examples of novel transcription factors used for therapeutic protein production include, but are not limited to those described for Erythropoietin production [J. Biol. Chem. 2000, 275(43):33850-60; J. Biol. Chem. 2000, 275(43):33850-60] and zinc fingers protein transcription factors (ZFP-TF) variants [J. Biol. Chem. 2000, 275(43) 33850-60].

[0826] Small GTPase Regulatory/Interacting Proteins:

[0827] The phrase “Small GTPase regulatory/interacting proteins” refers to proteins capable of regulating or interacting with GTPase such as RAB escort protein, guanyl-nucleotide exchange factor, guanyl-nucleotide exchange factor adaptor, GDP-dissociation inhibitor, GTPase inhibitor, GTPase activator, guanyl-nucleotide releasing factor, GDP-dissociation stimulator, regulator of G-protein signaling, RAS interactor, RHO interactor, RAB interactor, and RAL interactor.

[0828] Pharmaceutical compositions including such proteins or protein encoding sequences, antibodies directed against such proteins or polynucleotides capable of altering expression of such proteins, may be used to treat diseases in which G-proteases meditated signal-transduction is abnormal, either as a cause, or as a result of the disease. Antibodies and polynucleotides such as PCR primers and molecular the disease. Antibodies and polynucleotides such as PCR primers and molecular probes designed to identify such proteins or protein encoding sequences may be used for diagnosis of such diseases.

[0829] Examples of such diseases include, but are not limited to diseases related to prenylation. Modulation of prenylation was shown to affect therapy of diseases such as osteoporosis, ischemic heart disease, and inflammatory processes. Small GTPases regulatory/interacting proteins rare major component in the prenylation post translation modification, and are required to the normal activity of prenylated proteins. Thus, their variants may be used for therapy of prenylation associated diseases.

[0830] Calcium Binding Proteins:

[0831] The phrase “calcium binding proteins” refers to proteins involve in calcium binding, preferably, calcium binding proteins, ligand binding or carriers, such as diacylglycerol kinase, Calpain, calcium-dependent protein serine/threonine phosphatase, calcium sensing proteins, calcium storage proteins.

[0832] Pharmaceutical compositions including such proteins or protein encoding sequences, antibodies directed against such proteins or polynucleotides capable of altering expression of such proteins, may be used to treat calcium involved diseases. Antibodies and polynucleotides such as PCR primers and molecular probes designed to identify such proteins or protein encoding sequences may be used for diagnosis of such diseases.

[0833] Examples of such diseases include, but are not limited to diseases related to hypercalcemia, hypertension, cardiovascular disease, muscle diseases, gastro-intestinal diseases, uterus relaxing and uterus. An example for therapy use of calcium binding proteins variant may be treatment of emergency cases of hypercalcemia, with secreted variants of calcium storage proteins.

[0834] Oxidoreductase:

[0835] The term “oxidoreductase” refers to enzymes that catalyze the removal of hydrogen atoms and electrons from the compounds on which they act. Preferably, oxidoreductases acting on the following groups, of donors: CH—OH, CH—CH, CH—NH2, CH—NH; oxidoreductases acting on NADH or NADPH, nitrogenous compounds, sulfur group of donors, heme group, hydrogen group, diphenols and related substances as donors; oxidoreductases acting on peroxide as acceptor, superoxide radicals as acceptor, oxidizing metal ions, CH2 groups; oxidoreductases acting on reduced ferredoxin as donor; oxidoreductases acting on reduced flavodoxin as donor and oxidoreductases acting on the aldehyde or oxo group of donors.

[0836] Pharmaceutical compositions including such proteins or protein encoding sequences, antibodies directed against such proteins or polynucleotides capable of altering expression of such proteins, may be used to treat diseases caused by abnormal activity of oxidoreductases. Antibodies and polynucleotides such as PCR primers and molecular probes designed to identify such proteins or protein encoding sequences may be used for diagnosis of such diseases.

[0837] Examples of such diseases include, but are not limited to malignant and autoimmune diseases in which the enzyme DHFR (DiHydroFolateReductase) that participates in folate metabolism and essential for de novo glycine and purine synthesis is the target for the widely used drug Methotrexate (MTX).

[0838] Receptors:

[0839] The term “receptors” refers to protein-binding sites on a cell's surface or interior, that recognize and binds to specific messenger molecule leading to a biological response, such as signal transducers, complement receptors, ligand-dependent nuclear receptors, transmembrane receptors, GPI-anchored membrane-bound receptors, various coreceptors, internalization rectors, receptors to neurotransmitters, hormones and various other effectors and ligands.

[0840] Pharmaceutical compositions including such proteins or protein encoding sequences, antibodies directed against such proteins or polynucleotides capable of altering expression of such proteins, may be used to treat diseases caused by abnormal activity of receptors, preferably, receptors to neurotransmitters, hormones and various other effectors and ligands. Antibodies and polynucleotides such as PCR primers and molecular probes designed to identify such proteins or protein encoding sequences may be used for diagnosis of such diseases.

[0841] Examples of such diseases include, but are not limited to, chronic myelomonocytic leukemia caused by growth factor β receptor deficiency [Rao D. S., et al., (2001) Mol. Cell. Biol., 21(22):7796-806], thrombosis associated with protease-activated receptor deficiency [Sambrano G. R., et al., (2001) Nature, 413(6851):26-73, hypercholesterolemia associated with low density lipoprotein receptor deficiency [Koivisto U. M., et al., (2001) Cell, 105(5) 575-85], familial Hibernian fever associated with tumor necrosis factor receptor deficiency [Simon A., et al., (2001) Ned Tijdschr Geneeskd, 145(2):77-8], colitis associated with immunoglobulin E receptor expression [Dombrowicz D., et al. (2001) J. Exp. Med., 193(1):25-34], and alagille syndrome associated with Jagged1 [Stankiewicz P. et al., (2001) Am. J. Med. Genet., 103(2):166-71], breast cancer associated with mutated BRCA2 and androgen. Therapeutic applications of nuclear receptors variants may be based on secreted version of receptors such as the thyroid nuclear receptor that by binding plasma free thyroid hormone to reduce its levels may have a therapeutic effect in cases of thyrotoxicosis. A secreted version of glucocorticoid nuclear receptor, by binding plasma free cortisol, thus, reducing, may have a therapeutic effect in cases of Cushing's disease (a disease associated with high cortisole levels in the plasma).

[0842] Another example of a secreted variant of a receptor is a secreted form of the TNF receptor, which is used to treat conditions in which reduction of TNF levels is of benefit including Rheumatoid, Arthritis, Juvenile Rheumatoid Arthritis, Psoriatic Arthritis and Ankylosing Spondylitis.

[0843] Protein Serine/Threonine Kinases:

[0844] The phrase “protein serine/threonine kinases” refers to proteins which phosphorylate serine/threonine residues, mainly involved in signal transduction, such as transmembrane receptor protein serine/threonine kinase, 3-phosphoinositide-dependent protein kinase, DNA-dependent protein kinase, G-protein-coupled receptor phosphorylating protein kinase, SNF1A/AMP-activated protein kinase, casein kinase, calmodulin regulated protein kinase, cyclic-nucleotide dependent protein kinase, cyclin-dependent protein kinase, eukaryotic translation initiation factor 2a kinase, galactosyltransferase-associated kinase, glycogen synthase kinase 3, protein kinase C, receptor signaling protein see/threonine kinase, ribosomal protein S6 kinase, and IkB kinase.

[0845] Pharmaceutical compositions including such proteins or protein encoding sequences, antibodies directed against such proteins or polynucleotides capable of altering expression of such proteins may be used treat diseases ameliorated by a modulating kinase activity. Antibodies and polynucleotides such as PCR primers and molecular probes designed to identify such proteins or protein encoding sequences may be used for diagnosis of such diseases.

[0846] Examples of such diseases include, but are not limited to schizophrenia 5-HT(2A) serotonin receptor is the principal molecular target for LSD-like hallucinogens and atypical antipsychotic drugs. It hs been shown that a major mechanism for the attenuation of this receptor signaling following agonist activation typically involves the phosphorylation of serine and/or threonine residues by various kinases. Therefore, serine/threonine kinases specific for the 5-HT(2A) serotonin receptor may serve as drug targets for a disease such as schizophrenia. Other diseases that may be treated through serine/thereonine kinases modulation are Peutz-Jeghers syndrome (PJS, a rare autosomal-dominant disorder characterized by hamartomatous polyposis of the gastrointestinal tract and melanin pigmentation of the skin and mucous membranes [Hum. Mutat. 2000, 16(1):23-30], breast cancer [Oncogene. 1999, 18(35):4968-73], Type 2 diabetes insulin resistance [Am. J. Cardiol. 2002, 90(5A):11G-18G], and fanconi anemia [Blood. 2001, 98(13):3650-7].

[0847] Channel/Pore Class Transporters:

[0848] The phrase “Channel/pore class transporters” refers to proteins that mediate the transport of molecules and macromolecules across membranes, such as α-type channels, porins, and pore-forming toxins.

[0849] Pharmaceutical compositions including such proteins or protein encoding sequences, antibodies directed against such proteins or polynucleotides capable of altering expression of such proteins, may be used to treat diseases in which the transport of molecules and macromolecules are abnormal, therefore leading to various pathologies. Antibodies and polynucleotides such as PCR primers and molecular probes designed to identify such proteins or protein encoding sequences may be used for diagnosis of such diseases.

[0850] Examples of such diseases include, but are not limited to diseases of the nerves system such as Parkinson, diseases of the hormonal system, diabetes and infectious diseases such as bacterial and fungal infections. For example, α-hemolysin, is a protein product of S. aureus which creates ion conductive pores in the cell membrane, thereby deminishing its integrity.

[0851] Hydrolases, Acting on Acid Anhydrides:

[0852] The phrase “hydrolases, acting on acid anhydrides” refers to hydrolytic enzymes that are acting on acid anhydrides, such as hydrolases acting on acid anhydrides in phosphorus containing anhydrides or in sulfonyl-containing anhydrides, hydrolases catalyzing transmembrane movement of substances, and involved in cellular and subcellular movement.

[0853] Pharmaceutical compositions including such proteins or protein encoding sequences, antibodies directed against such proteins or polynucleotides capable of altering expression of such proteins may be used to treat diseases in which the hydrolase-related activities are abnormal. Antibodies and polynucleotides such as PCR primers and molecular probes designed to identify such proteins or protein encoding sequences may be used for diagnosis of such diseases.

[0854] Examples of such diseases include, but are not limited to glaucoma treated with carbonic anhydrase inhibitors (e.g. Dorzolamide), peptic ulcer disease treated with H(⁺)K(⁺)ATPase inhibitors that were shown to affect disease by blocking gastric carbonic anhydrase (e.g. Omeprazole).

[0855] Transferases, Transferring Phosphorous-Containing Groups:

[0856] The phrase “transferases, transferring phosphorus-containing groups” refers to enzymes that catalyze the transfer of phosphate from one molecule to another, such as phosphotransferases using the following groups as acceptors: alcohol group, carboxyl group, nitrogenous group, phosphate, phosphotransferases with regeneration of donors catalyzing intramolecular transfers; phosphotransferases; nucleotidyltransferase; and phosphotransferases for other substituted phosphate groups.

[0857] Pharmaceutical compositions including such proteins or protein encoding sequences, antibodies directed against such proteins or polynucleotides capable of altering expression of such proteins may be used to treat diseases in which the transfer of a phosphorous containing functional group to a modulated moiety is abnormal. Antibodies and polynucleotides such as PCR primers and molecular probes designed to identify such proteins or protein encoding sequences may be used for diagnosis of such diseases.

[0858] Examples of such diseases include, but are not limited to acute MI [Ann. Emerg. Med. 2003, 42(3):343-750], Cancer, [Oral. Dis. 2003, 9(3):119-28; J. Surg. Res. 2003, 113(1):102-8] and Alzheimer's disease [Am. J. Pathol. 2003, 163(3):845-58]. Examples for possible utilities of such transferases for drug improvement include, but are not limited to aminoglycosides treatment (antibiotics) to which resistance is mediated by aminoglycoside phosphotransferases [Front. Biosci. 1999, 1; 4:D9-21]. Using aminoglycoside phosphotransferases variants or inhibiting these enzymes may reduce aminoglycosides resistance. Since aminoglycosides can be toxic to some patients, proving the expression of aminoglycoside phosphotransferases in a patient can deter from treating him with aminoglycosides and risking the patient in vain.

[0859] Phosphoric Monoester Hydrolases:

[0860] The phrase “phosphoric monoester hydrolases” refers to hydrolytic enzymes that are acting on ester bonds, such as nuclease, sulfuric ester hydrolase, carboxylic ester hydrolase, thiolester hydrolase, phosphoric monoester hydrolase, phosphoric diester hydrolase, triphosphoric monoester hydrolase, diphosphoric monoester hydrolase, and phosphoric triester hydrolase.

[0861] Pharmaceutical compositions including such proteins or protein encoding sequences, antibodies directed against such proteins or polynucleotides capable of altering expression of such proteins, may be used to treat diseases in which the hydrolytic cleavage of a covalent bond with accompanying addition of water (—H being added to one product of the cleavage and —OH to the other), is abnormal. Antibodies and polynucleotides such as PCR primers and molecular probes designed to identify such proteins or protein encoding sequences may be used for diagnosis of such diseases.

[0862] Examples of such diseases include, but are not limited to diabetes and CNS diseases such as Parkinson and cancer.

[0863] Enzyme Inhibitors:

[0864] The term “enzyme inhibitors” refers to inhibitors and suppressors of other proteins and enzymes, such as inhibitors of kinases, phosphatases, chaperones, guanylate cyclase, DNA gyrase, ribonuclease, proteasome inhibitors, diazepam-binding inhibitor, ornithine decarboxylase, inhibitors, dUTP pyrophosphatase inhibitor, phospholipase inhibitor, proteinase inhibitor, protein biosynthesis inhibitors, and amylase inhibitors.

[0865] Pharmaceutical compositions including such proteins or protein encoding sequences, antibodies directed against such proteins or polynucleotides capable of altering expression of such proteins, may be used to treat diseases in which beneficial effect may be achieved by modulating the activity of inhibitors and suppressors of proteins and enzymes. Antibodies and polynucleotides such as PCR primers and molecular probes designed to identify such proteins or protein encoding sequences may be used for diagnosis of such diseases.

[0866] Examples of such diseases include, but are not limited to α-1 antitrypsin (a natural serine proteases, which protects the lung and liver from proteolysis) deficiency associated with emphysema, COPD and liver chirosis α-1 antitrypsin is also used for diagnostics in cases of unexplained liver and lung disease. A variant of this enzyme may act as protease inhibitor or a diagnostic target for related diseases.

[0867] Electron Transporters:

[0868] The term “Electron transporters” refers to ligand binding or carrier proteins involved in electron transport such as flavin-containing electron transporter, cytochromes, electron donors, electron acceptors, electron carriers, and cytochrome-c oxidases.

[0869] Pharmaceutical compositions including such proteins or protein encoding sequences, antibodies directed against such proteins or polynucleotides capable of altering expression of such proteins, may be used to treat diseases in which beneficial effect may be achieved by modulating the activity of electron transporters. Antibodies and polynucleotides such as PCR primers and molecular probes designed to identify such proteins or protein encoding sequences may be used for diagnosis of such diseases.

[0870] Examples of such diseases include, but are not limited to cyanide toxicity, resulting from cyanide binding to ubiquitous metalloenzymes rendering them inactive, and interfering with the electron transport. Novel electron transporters to which cyanide can bind may serve as drug targets for new cyanide antidotes.

[0871] Transferases, Transferring Glycosyl Groups:

[0872] The phrase “transferases, transferring glycosyl groups” refers to enzymes that catalyze the transfer of a glycosyl chemical group from one molecule to another such as murein lytic endotransglycosylate E, and sialyltransferase.

[0873] Pharmaceutical compositions including such proteins or protein encoding sequences, antibodies directed against such proteins or polynucleotides capable of altering expression of such proteins, may be used to treat diseases in which the transfer of a glycosyl chemical group is abnormal. Antibodies and polynucleotides such as PCR primers and molecular probes designed to identify such proteins or protein encoding sequences may be used for diagnosis of such diseases.

[0874] Ligases, Forming Carbon-Oxygen Bonds:

[0875] The phrase “ligases, forming carbon-oxygen bonds” refers to enzymes that catalyze the linkage between carbon and oxygen such as ligase forming aminoacyl-tRNA and related compounds.

[0876] Pharmaceutical compositions including such proteins or protein encoding sequences, antibodies directed against such proteins or polynucleotides capable of altering expression of such proteins, may be used to treat diseases in which the linkage between carbon and oxygen in an energy dependent process is abnormal. Antibodies and polynucleotides such as PCR primers and molecular probes designed to identify such proteins or protein encoding sequences may be used for diagnosis of such diseases.

[0877] Ligases:

[0878] The term “ligases” refers to enzymes that catalyze the linkage of two molecules, generally utilizing ATP as the energy donor, also called synthetase. Examples for ligases are enzymes such as β-alanyl-dopamine hydrolase, carbon-oxygen bonds forming ligase, carbon-sulfur bonds forming ligase, carbon-nitrogen bonds forming ligase, carbon-carbon bonds forming ligase, and phosphoric ester bonds forming ligase.

[0879] Pharmaceutical compositions including such proteins or protein encoding sequences, antibodies directed against such proteins or polynucleotides capable of altering expression of such proteins, may be used to treat diseases in which the joining together of two molecules in an energy dependent process is abnormal. Antibodies and polynucleotides such as PCR primers and molecular probes designed to identify such proteins or protein encoding sequences may be used for diagnosis of such diseases.

[0880] Examples of such diseases include, but are not limited to neurological disorders such as Parkinson's disease [Science. 2003, 302(5646):819-22; J. Neurol. 2003, 250 Suppl. 3:III25—III29] or epilepsy [Nat. Genet. 2003, 35(2):125-7], cancerous diseases [Cancer Res. 2003, 63(17):5428-37; Lab. Invest. 2003, 83(9):1255-65], renal diseases [Am. J. Pathol. 2003, 163(4):1645-523, infectious diseases [Arch. Virol. 2003, 148(9):1851-62] and fanconi anemia [Nat. Genet. 2003, 35(2):165-70].

[0881] Hydrolases, Acting on Glycosyl Bonds:

[0882] The phrase “hydrolases, acting on glycosyl bonds” refers to hydrolytic enzymes that are acting on glycosyl bonds such as hydrolases hydrolyzing N-glycosyl compounds, S-glycosyl compounds, and O-glycosyl compounds.

[0883] Pharmaceutical compositions including such proteins or protein encoding sequences, antibodies directed against such proteins or polynucleotides capable of altering expression of such proteins, may be used to treat diseases in which the hydrolase-related activities are abnormal. Antibodies and polynucleotides such as PCR primers and molecular probes designed to identify such proteins of protein encoding sequences may be used for diagnosis of such diseases.

[0884] Examples oft such diseases include cancerous diseases [J. Natl. Cancer Inst. 2003, 95(17):1263-5; Carcinogenesis. 2003, 24(7):1281-2; author reply 1283] vascular diseases [J. Thorac. Cardiovasc. Surg. 2003, 126(2):344-57], gastrointestinal diseases such as colitis [J. Immunol. 2003, 171(3):1556-63] or liver fibrosis [World J. Gastroenterol. 2002, 8(5):901-7].

[0885] Kinases:

[0886] The term “kinases” refers to enzymes which phosphorylate serine/threonine or tyrosine residues, mainly involved in signal transduction. Examples for kinases include enzymes such as 2-amino-4-hydroxy-6-hydroxymethyldihydropteridine pyrophosphokinase, NAD(⁺) kinase, acetylglutamate kinase, adenosine kinase, adenylate kinase, adenylsulfate kinase, arginine kinase, aspartate kinase, choline kinase, creatine kinase, cytidylate kinase, deoxyadenosine kinase, deoxycytidine kinase, deoxyguanosine, kinase, dephospho-CoA kinase, diacylglycerol kinase, dolichol kinase, ethanolamine kinase, galactokinase, glucokinase, glutamate 5-kinase, glycerol kinase, glycerone kinase, guanylate kinase, hexokinase, homoserine kinase, hydroxyethylthiazole kinase, inositol/phosphatidylinositol kinase, ketohexokinase, mevalonate kinase, nucleoside-diphosphate kinase, pantothenate kinase, phosphoenolpyruvate carboxykinase, phosphoglycerate kinase, phosphomevalonate kinase, protein kinase, pyruvate dehyrogenase (lipoamide) kinase, pyruvate kinase, ribokinase, ribose-phosphate pyrophosphokinase, selenide, water dikinase, shikimate kinase, thiamine pyrophosphokinase, thymidine kinase, thymidylate kinase, uridine kinase, xylulokinase, 1D-myo-inositol-trisphosphate 3-kinase, phosphofructokinase, pyridoxal kinase, shinganine kinase, riboflavin kinase, 2-dehydro-3-deoxygalactonokinase, 2-dehydro-3-deoxygluconokinase, 4-diphosphocytidyl-2C-methyl-D-erythritol-kinase, GTP pyrophosphokinase, L-fuculokinase, L-ribulokinase, L-xylulokinase, isocitrate dehydrogenase (NADP⁺) kinase, acetate kinase, allose kinase, carbamate kinase, cobinamide kinase, diphosphate-purine nucleoside kinase, fructokinase, glycerate kinase, hydroxymethylpyrimidine kinase, hygromycin-B kinase, inosine kinase, kanamycin kinase, phosphomethylpyrimidine kinase, phosphoribulokinase, polyphosphate kinase, propionate kinase, pyruvate, water dikinase, rhamnulokinase, tagatose-6-phosphate kinase, tetraacyldisaccharide 4′-kinase, thiamine-phosphate kinase, undecaprenol kinase, uridylate kinase, N-acylmannosamine kinase, D-erythro-sphingosine kinase.

[0887] Pharmaceutical compositions including such proteins or protein encoding sequences, antibodies directed against such proteins or polynucleotides capable of altering expression of such proteins, may be used to treat diseases which may be ameliorated by a modulating kinase activity. Antibodies and polynucleotides such as PCR primers and molecular probes designed to identify such proteins or protein encoding sequences may be used for diagnosis of such diseases.

[0888] Examples of such diseases include, but are not limited to, acute lymphoblastic leukemia associated with spleen tyrosine kinase deficiency [Goodman P. A., et al., (2001) Oncogene, 20(30):3969-78], ataxia telangiectasia associated with ATM kinase deficiency [Boultwood J., (2001) J. Clin. Pathol., 54(7):512-6], congenital haemolytic anaemia associated with erythrocyte pyruvate kinase deficiency [Zanella A., et al., (2001) Br. J. Haematol., 113(1):43-8], mevalonic aciduria caused by mevalonate kinase deficiency [Houten S. M., et al., (2001) Eur. J. Hum. Genet., 9(4):253-9], and acute myelogenous leukemia associated with over-expressed death-associated protein kinase [Guzman M. L., et al., (2001) Blood, 97(7):2177-9].

[0889] Nucleotide Binding:

[0890] The term “nucleotide binding” refers to ligand binding or carrier proteins, involved in physical interaction with a nucleotide, preferably, any compound consisting of a nucleoside that is esterified with [ortho]phosphate or an oligophosphate at any hydroxyl group on the glycose moiety, such as purine nucleotide binding proteins.

[0891] Pharmaceutical compositions including such proteins or protein encoding sequences, antibodies directed against such proteins or polynucleotides capable of altering expression of such proteins, may to be used to treat diseases that are associated with abnormal nucleotide binding. Antibodies and polynucleotides such as PCR primers and molecular probes designed to identify such proteins or protein encoding sequences may be used for diagnosis of such diseases.

[0892] Examples of such diseases include, but are not limited to Gout (a syndrome characterized by high urate level in the blood). Since urate is a breakdown metabolite of purines, reducing purines serum levels could have a therapeutic effect in Gout disease.

[0893] Tubulin Binding:

[0894] The term “tubulin binding” refers to binding proteins that bind tubulin such as microtubule binding proteins.

[0895] Pharmaceutical co positions including such proteins or protein encoding sequences, antibodies directed against such proteins or polynucleotides capable of altering expression of such proteins, may be used to treat diseases which are associated with abnormal tubulin activity or structure. Binding the products of the genes of this family, or antibodies reactive therewith, can modulate a plurality of tubulin activities as well as change microtubulin structure. Antibodies and polynucleotides such as PCR primers and molecular probes designed to identity such proteins or protein encoding sequences may be used for diagnosis of such diseases.

[0896] Examples of such diseases include, but are not limited to, Alzheimer's disease associated with t-complex polypeptide 1 deficiency [Schuller E., et al., (2001) Life Sci., 69(3):263-70], neurodegeneration associated with apoE deficiency [Masliah E., et al., (1995) Exp. Neurol., 136(2):107-22], progressive axonopathy associated with disfuctional neurofilaments [Griffiths I. R., et al., (1989) Neuropathol. Appl. Neurobiol., 15(1):63-74], familial frontotemporal dementia associated with tau deficiency [astor P., et al., (2001) Ann. Neurol., 49(2):263-7], and colon cancer suppressed by APC White R. L., (1997) Pathol. Biol. (Paris), 45(3):2404]. En example for a drug whose target is tubulin is the anticancer drug—Taxol. Drugs having similar mechanism of action (interfering with tubulin polymerization) may be developed based on tubulin binding proteins.

[0897] Receptor Signaling Proteins:

[0898] The phrase “receptor signaling proteins” refers to receptor proteins involved in signal transduction such as receptor signaling protein serine/threonine kinase, receptor signaling protein tyrosine kinase, receptor signaling protein tyrosine phosphatases, aryl hydrocarbon receptor nuclear translocator, hematopoeitin interferon-class (D200-domain) cytokine receptor signal transducer, transmembrane receptor protein tyrosine kinase signaling protein, transmembrane receptor protein serine/threonine kinase signaling protein, receptor signaling protein serine/threonine kinase signaling protein, receptor signaling protein serine/threonine phosphatase signaling protein, small GTPase regulatory/interacting protein, receptor signaling protein tyrosine kinase signaling protein, and receptor signaling protein serine/threonine phosphatase.

[0899] Pharmaceutical compositions including such proteins or protein encoding sequences, antibodies directed against such proteins or polynucleotides capable of altering expression of such proteins, may be used to treat diseases in which the signal-transduction is abnormal, either as a cause, or as a result of the disease. Antibodies and polynucleotides such as PCR primers and molecular probes designed to identify such proteins or protein encoding sequences may be used for diagnosis of such diseases.

[0900] Examples of such diseases include, but are not limited to, complete hypogonadotropic hypogonadism associated with GnRH receptor deficiency [Kottler M. L., et a., (2000) J. Clin. Endocrinol. Metab., 85(9):3002-8], severe combined immunodeficiency disease associated with IL-7 receptor deficiency [Puel A. and Leonard W. J., (2000) Curr. Opin. Immunol., 12(4):468-7], schizophrenia associated N-methyl-D-aspartate receptor deficiency [Mohn A. R., et al., (1999) Cell, 98(4):427-36], Yesinia-associated arthritis associated with tumor necrosis factor receptor p55 deficiency [Zhao Y. X., et al., (1999) Arthritis Rheum., 42(8):1662-72], and Dwarfism of Sindh caused by growth hormone-releasing hormone receptor deficiency [aheshwari H. G., et al., (1998) J. Clin. Endocrinol. Metab., 83(11):4065-74].

[0901] Molecular Function Unknown:

[0902] The phrase “molecular function unknown” refers to various proteins with unknown molecular function, such as cell surface antigens.

[0903] Pharmaceutical compositions including such proteins or protein encoding sequences, antibodies directed against such proteins or polynucleotides capable of altering expression of such proteins, may be used to treat diseases in which regulation of the recognition, or participation or bind of cell surface antigens to other moieties may have therapeutic effect. Antibodies and polynucleotides such as PCR primers and molecular probes designed to identify su proteins or protein encoding sequences may be used for diagnosis of such diseases.

[0904] Examples of such diseases include, but are not limited to, autoimmune diseases, various infectious diseases, cancer diseases which involve non cell surface antigens recognition and activity.

[0905] Enzyme Activators:

[0906] The term “enzyme activators” refers to enzyme regulators such as activators of kinases, phosphatases, sphingolipids, chaperones, guanylate cyclase, tryptophan hydroxylase, proteases, phospholipases, caspases, proprotein convertase 2 activator, cyclin-dependent protein kinase 5 activator superoxide-generating NADPH oxidase activator, sphingomyelin phosphodiesterase activator, monophenol monooxygenase activator, proteasome activator, and GTPase activator.

[0907] Pharmaceutical compositions including such proteins or protein encoding sequences, antibodies directed against such proteins or polynucleotides capable of altering expression of such proteins, may be used to treat diseases in which beneficial effect may be achieved by modulating the activity of activators of proteins and enzymes. Antibodies and polynucleotides such as PCR primers and molecular probes designed to identify such proteins or protein encoding sequences nay be used for diagnosis of such diseases.

[0908] Examples of such diseases include, but are not limited to all complement related diseases, as most complement proteins activate by cleavage other complement proteins.

[0909] Transferases, Transferring One-Carbon Groups:

[0910] The phrase “transferases, transferring one-carbon groups” refers enzymes that catalyze the transfer of a one-carbon chemical group from one molecule to another such as methyltransferase, amidinotransferase, hydroxymethyl-, formyl-, and related transferase, carboxyl- and carbamoyltransferase.

[0911] Pharmaceutical compositions including such proteins or protein encoding sequences, antibodies directed against such proteins or polynucleotides capable of altering expression of such proteins, may be used to treat diseases in which the transfer of a one-carbon chemical group from one molecule to another is abnormal so that a beneficial effect may be achieved by modulation of such reaction. Antibodies and polynucleotides such as PCR primers and molecular probes signal to identify such proteins or protein encoding sequences may be used for diagnosis of such diseases.

[0912] Transferases:

[0913] The term “transferases” refers to enzymes that catalyze the transfer of a chemical group, preferably, a phosphate or amine from one molecule to another. It includes enzymes such as transferases, transferring one-carbon groups, aldehyde or ketonic groups, acyl groups, glycosyl groups, alkyl or aryl (other than methyl) groups, nitrogenous, phosphors-containing groups, sulfur-containing groups, lipoyltransferase, deoxycytidyl transferases.

[0914] Pharmaceutical compositions including such proteins or protein encoding sequences, antibodies directed against such proteins or polynucleotides capable of altering expression of such proteins, may be used to treat diseases in which the transfer of a chemical group from one molecule to another is abnormal. Antibodies and polynucleotides such as PCR primers and molecular probes designed to identify such proteins or protein encoding sequences may be used for diagnosis of such diseases.

[0915] Examples of such diseases include, but are not limited to cancerous diseases such as prostate cancer [Urology. 2003, 62(5 Suppl 1):55-62] or lung cancer [Invest. New Drugs. 2003, 21(4):435-43; JAMA. 2003, 22; 290(16):2149-58], psychiatric disorders [Am. J. Med. Genet. 2003, 15; 123B(1):64-9], colorectal disease such as Crohn's disease [Dis. Colon Rectum. 2003, 46(11):1498-507] or celiac diseases [N Engl. J. Med. 2003, 349(17):1673-4; author reply 1673-4], neurological diseases such as Parkinson's disease [J. Chem Neuroanat. 2003, 26(2):143-51], Alzheimer disease [Hum. Mol. Genet. 2003 21] or Charcot-Marie-Tooth Disease [Mol. Biol. Evol. 2003 31].

[0916] Chaperones:

[0917] The term “chaperones” refers to functional classes of unrelated families of proteins that assist the correct non-covalent assembly of other polypeptide-containing structures in vivo, but are not components of these assembled structures when they a performing their normal biological function. The group of chaperones include proteins such as ribosomal chaperone, peptidylprolyl isomerase, lectin-binding chaperone, nucleosome assembly chaperone, chaperonin ATPase, cochaperone, heat shock protein, HSP70/HSP9 organizing protein, fimbrial, chaperone, metallochaperone, tubulin folding, and HSC70-interacting protein.

[0918] Pharmaceutical compositions including such proteins or protein encoding sequences, antibodies directed against such proteins or polynucleotides capable of altering expression of “such proteins, may be used to treat diseases which are associated with abnormal protein activity, structure, degradation or accumulation of proteins. Antibodies and polynucleotides such as PCR primers and molecular probes designed to identity such proteins or protein encoding sequences may be used for diagnosis of such diseases.

[0919] Examples of such diseases include, but are not limited to neurological syndromes [J. Neuropathol. Exp. Neurol. 2003, 62(7):751-64; Antioxid Redox Signal. 2003, 5(3):337-48; J. Neurochem. 2003, 86(2):394-404], neurological diseases such as Parkinson's disease [Hum. Genet. 2003, 6; Neurol Sci. 2003, 24(3):159-60; J. Neurol. 2003, 250 Suppl. 3:III25-III29] ataxia [J. Hum. Genet. 2003; 48(8):415-9] or Alzheimer diseases [J. Mol. Neurosci. 2003, 20(3):283-6; J. Alzheimers Dis. 2003, 5(3):171-7], cancerous diseases [Semin. Oncol. 2003, 30(5):709-16], prostate cancer [Semin. Oncol. 2003, 30(5):709-16] metabolic diseases [J. Neurochem. 2003, 87(1):248-56], infectious diseases, such as prion infection [EMBO J. 2003, 22(20):5435-5445]. Chaperones may, be also used for manipulating therapeutic proteins binding to their receptors therefore, improving their therapeutic effect.

[0920] Cell Adhesion Molecule:

[0921] The phrase “cell adhesion molecule” refers to proteins that serve adhesion molecules between adjoining cells such as membrane-associated protein with guanylate kinase activity, cell adhesion receptor, neuroligin, calcium-dependent cell adhesion molecule, selectin, calcium-independent cell adhesion molecule, and extracellular matrix protein.

[0922] Pharmaceutical compositions including such proteins or protein encoding sequences, antibodies directed against such proteins or polynucleotides capable of altering expression of such proteins, may be used to treat diseases in which adhesion between adjoining cells is involved, typically conditions in which the adhesion is abnormal. Antibodies and polynucleotides such as PCR primers and molecular probes designed to identify such proteins or protein encoding sequences may be used for diagnosis of such diseases.

[0923] Examples of such diseases include, but are not limited to cancer in which abnormal adhesion may cause and enhance the process of metastasis and abnormal growth and development of various tissues in which modulation adhesion among adjoining cells can improve the condition. Leucocyte-endothelial interactions characterized by adhesion molecules involved in interactions between cells lead to a tissue injury and ischemia reperfusion disorders in which activated signals generated during ischemia may trigger an exuberant inflammatory response during reperfusion provoking greater tissue damage than initial ischemic insult [Crit. Care Med. 2002, 30(5 Suppl):S214-9]. The blockade of leucocyte-endothelial adhesive interactions has the potential to reduce vascular and tissue injury. This blockade may be achieved using a soluble variant of the adhesion molecule.

[0924] States of septic shock and ARDS involve large recruitment of neutrophil cells to the damaged tissues. Neutrophil cells to bind to the endothelial cells in the target tissues through adhesion molecules. Neutrophils possess multiple effector mechanisms that can produce endothelial and lung tissue injury, and interfere with pulmonary gas transfer by disruption of surfactant activity [Eur. J. Surg. 2002, 168(4):204-14]. In such cases, the use of soluble variant of the adhesion molecule may decrease the adhesion of neutrophils to the damaged tissues.

[0925] Examples of such diseases include, but are not limited to, Wiskott-Aldrich syndrome associated with WAS deficiency [Westerberg L., et al., (2001) Blood, 98(4):1086-94], asthma associated with intercellular adhesion molecule-1 deficiency [Tang M. L. and Fiscus L. C., (2001) Pulm. Pharmacol. Ther., 14(3):203-10], intra-atrial thrombogenesis associated with increased von Willebrand factor activity [Fukuchi M., et al., (2001) J. Am. Coil. Cardiol., 37(5):1436-42], junctional, epidermolysis bullosa associated with laminin 5-β-3 deficiency [Robbins P. B., et al., (2001) Proc. Natl. Acad. Sci., 98(9):5193-8], and hydrocephalus caused by neural adhesion molecule L1 deficiency [Rolf B., et al., (2001) Brain Res., 891(1-2):247-52].

[0926] Motor Proteins:

[0927] The term “motor proteins” refers to proteins that generate force or energy by the hydrolysis of ATP and that function in the production of intracellular movement or transportation. Examples of such proteins include microfilament motor, axonemal motor, microtubule motor, and kinetochore motor (dynein, kinesin, or myosin).

[0928] Pharmaceutical compositions including such proteins or protein encoding sequences, antibodies directed against such proteins or polynucleotides capable of altering expression of such proteins, may be used to treat diseases in which force or energy generation is impaired. Antibodies and polynucleotides such as PCR primers and molecular probes designed to identify such proteins or protein encoding sequences may be used for diagnosis of such diseases.

[0929] Examples of such diseases include, but are not limited to, malignant diseases where microtubules are drug targets for a family of anticancer drugs such, as myodystrophies and myopathies [Tends Cell Biol. 2002, 12(12):585-91], neurological disorders [Neuron. 2003, 25; 40(1): 25-40; Trends Biochem. Sci. 2003, 28(10):558-65; Med. Genet. 2003, 40(9):671-5], and hearing impairment [Trends Biochem. Sci. 2003, 28(10):558-65].

[0930] Defense/Immunity Proteins:

[0931] The term “defense/immunity proteins” refers to protein that are involved in the immune and complement systems such as acute-phase response proteins, antimicrobial peptides, antiviral response proteins, blood coagulation factors, complement components, immunoglobulins, major histocompatibility complex antigens and opsonins.

[0932] Pharmaceutical compositions including such proteins or protein encoding sequences, antibodies directed against such proteins or polynucleotides capable of altering expression of such proteins, may be used to treat diseases involving the immunological system including inflammation, autoimmune diseases, infectious diseases, as well as cancerous processes or diseases which are manifested by abnormal coagulation processes, which may include abnormal bleeding or excessive coagulation. Antibodies and polynucleotides such as PCR primers and molecular probes designed to identify such proteins or protein encoding sequences may be used for diagnosis of such diseases.

[0933] Examples of such diseases include, but are not limited to, late (C5-9) complement component deficiency associated with opsonin receptor allotypes [Fijen C. A., et al., (2000) Clin. Exp. Immunol., 120(2):338-45], combined immunodeficiency associated with defective expression of MHC class II genes [Griscelli, C., et al., (1989) Immununodefic. Rev. 1(2):135-53], loss of antiviral activity of CD4 T cells caused by neutralization of endogenous TNFα [Pavic I., et al., (1993) J. Gen. Virol., 74 (Pt 10):2215-23], autoimmune diseases associated with natural resistance-associated macrophage protein, deficiency [Evans C. A., et al., (2001) Neurogenetics, 3(2):69-78], Epstein-Barr virus-associated lymphoproliferative disease inhibited by combined GM-CSF and IL-2 therapy; [Baiocchi R. A., et al., (2001) J. Clin. Invest., 108(6):887-94] and sepsis in which activate protein C is therapeutic protein itself.

[0934] Intracellular Transporters:

[0935] The term “intracellular transporters” refers to proteins that mediate the transport of molecules and macromolecules inside the cell, such as intracellular nucleoside transporter, vacuolar assembly proteins, vesicle transporters, vesicle fusion proteins, type II protein secretors.

[0936] Pharmaceutical compositions including such proteins or protein encoding sequences, antibodies directed against such proteins or polynucleotides capable of altering expression of such proteins, may be used to treat diseases in which the transport of molecules and macromolecules is abnormal leading to various pathologies. Antibodies and polynucleotides such as PCR primers and molecular probes designed to identify such proteins or protein encoding sequences may be used for diagnosis of such diseases.

[0937] Transporters:

[0938] The term “transporters” refers to proteins that mediate the transport of molecules and macromolecules, such as channels, exchangers, and pumps. Transporters include proteins such as: amine/polyamine transporter, lipid transporter, neurotransmitter transporter, organic acid transporter, oxygen transporter, water transporter, carriers, intracellular transports, protein transporters, ion transporters, carbohydrate transporter, polyol transporter, amino acid transporters, vita cofactor transporters, siderophore transporter, drug transporter, channel/pore class transporter, group translocator, auxiliary transport proteins, permeases, murein transporter, organic alcohol transporter, nucleobase, nucleoside, and nucleotide and nucleic acid transporters.

[0939] Pharmaceutical compositions including such proteins or protein encoding sequences, antibodies directed against such proteins or polynucleotides capable of altering expression of such proteins, may be used to treat diseases in which transport of molecules and macromolecules such as neurotransmitters, hormones, sugar etc. is impaired leading to various pathologies. Antibodies and polynucleotides such as PCR primers and molecular probes designed to identify such proteins or protein encoding sequences may be used for diagnosis of such diseases.

[0940] Examples of such diseases include, but are not limited to, glycogen storage disease caused by glucose-6-phosphate transporter deficiency [Hiraiwa H., and Chou J. Y. (2001) DNA Cell Biol., 20(8):447-53], tangier disease associated with ATP-binding cassette transporter-1 deficiency [McNeish J., et al., (2000) Proc. Natl. Acad. Sci., 97(8):4245-50], systemic primary carnitine deficiency associated with organic cation transporter deficiency [Tang N. L., et al., (1999) Hum. Mol. Genet., 8(4):655-60], Wilson disease associated with copper-transporting ATPases deficiency [Payne A. S., et al., (1998) Proc. Natl. Acad. Sci. 95(18):10854-9], and atelosteogenesis associated with diastrophic dysplasia sulphate transporter deficiency [Newbury-Ecob R., (1998) J. Med. Genet., 35(1):49-53], Central Nervous system diseases treated by inhibiting neurotransmitter transporter (e.g. Depression, treated with serotonin transporters inhibitors—Prozac), and Cystic fibrosis mediated by the chloride channel CFTR. Other transporter related diseases are cancer [Oncogene. 2003, 22(38):6005-12] and especially cancer resistant to treatment [Oncologist. 2003, 8(5):411-24; J. Med. Invest. 2003, 50(3-4):126-35], infectious diseases, especially fungal infections [Annu. Rev. Phytopathol. 2003, 41:641-67], neurological diseases, such as Parkinson [FASEB J. 2003, Sep. 4 [Epub ahead of print]], and cardiovascular diseases, including hypercholesterolemia [Am. J. Cardiol. 2003, 92(4B):10K-16K].

[0941] There are about 30 membrane transporter genes linked to a known genetic clinical syndrome. Secreted versions of splice variants of transporters may be therapeutic as the case with soluble receptors. These transporters may have the capability to bind the compound in the serum they would normally bind on the membrane. For example, a secreted form AT-T7B, a transporter involved in Wilson's disease, is expected to bind plasma Copper, therefore have a desired therapeutic effect in Wilson's disease.

[0942] Lyases:

[0943] The term “lyases” refers to enzymes that catalyze the formation of double bonds by removing chemical groups from a substrate without hydrolysis or catalyze the addition of chemical groups to double bonds. It includes enzymes such as carbon-carbon lyase, carbon-oxygen lyase, carbon-nitrogen lyase, carbon-sulfur lyase, carbon-halide lyase, and phosphorus-oxygen lyase.

[0944] Pharmaceutical compositions including such proteins or protein encoding sequences, antibodies directed against such proteins or polynucleotides capable of alternating expression of such proteins, may be used to treat diseases in which the double bonds formation catalyzed by these enzymes is impaired. Antibodies and polynucleotides such as PCR primers and molecular probes designed to identify such proteins or protein encoding sequences may be used for diagnosis of diseases.

[0945] Examples of such diseases include, but are not limited to, autoimmune diseases [JAMA. 2003, 290(13):1721-8; JAMA. 2003, 290(13):1713-20], diabetes [Diabetes. 2003, 52(9):2274-8], neurological disorders such as epilepsy: [J. Neurosci. 2003, 23(24):8471-9], Parkinson [J. Neurosci. 2003, 23(23):8302-9; Lancet. 2003, 362(9385):712] or Creutzfeldt-Jakob disease [Clin. Neurophysiol. 2003, 114(9):1724-8], and cancerous diseases [J. Pathol. 2003, 201(1):37-45; J. Pathol. 2003, 201(1):37-45; Cancer Res. 2003, 63(16):4952-9; Eur. J. Cancer. 2003, 39(13):1899-903].

[0946] Actin Binding Proteins:

[0947] The phrase “actin binding proteins” refers to proteins binding actin as actin cross-linking, actin bundling, F-actin capping, lactin monomer binding, actin lateral binding, actin depolymerizing, actin monomer sequestering, actin filament severing, actin modulating, membrane associated actin binding, actin thin filament length regulation, and actin polymerizing proteins.

[0948] Pharmaceutical compositions including such proteins or protein encoding sequences, antibodies directed against such proteins or polynucleotides capable of altering expression of such proteins, may be used to treat diseases in which actin binding is impaired. Antibodies and polynucleotides such as PCR primers and molecular probes designed to identify such proteins or protein encoding sequences may be used for diagnosis of such diseases.

[0949] Examples of such diseases include, but are not limited to, neuromuscular diseases such as muscular dystrophy [Neurology. 2003, 61(3):404-6], Cancerous diseases [Urology. 2003, 61(4):845-50; J. Cutan. Pathol. 2002, 29(7):430; Cancer. 2002, 94(6):1777-86; Clin. Cancer Res. 2001, 7(8):2415-24; Breast Cancer Res. Treat. 2001, 65(1):11-21], renal diseases such as glomerulonephritis [J. Am. Soc. Nephrol. 2002, 13(2):322-31; Eur. J. Immunol. 2001, 31(4):1221-7], and gastrointestinal diseases such as Crohn's disease [J. Cell Physiol. 2000, 182(2):303-9].

[0950] Protein Binding Proteins:

[0951] The phrase “protein binding proteins” refers to proteins involved in diverse biological functions through binding other proteins. Examples of such biological function include intermediate filament binding, LIM-domain binding, LLR-domain binding, clathrin binding, ARF binding, vinculin binding, KU70 binding, troponin C binding PDZ-domain binding, SH3-domain binding, fibroblast growth factor binding, membrane-associated protein with guanylate kinase activity interacting, Wnt-protein binding, DEAD/H-box RNA helicase binding β-amyloid binding, myosin binding, TATA-binding protein binding DNA topoisomerase I binding, polypeptide hormone binding, RHO binding, FH1-domain binding, syntaxin-1 binding, HSC70-interacting, transcription factor binding, metarhodopsin binding, tubulin binding, JUN kinase binding, RAN protein binding, protein signal sequence binding, importin α export receptor, poly-glutamine tract binding, protein carrier, β-catenin binding, protein C-terminus binding, lipoprotein binding, cytoskeletal protein binding protein, nuclear localization sequence binding, protein phosphatase 1 binding, adenylate cyclase binding, eukaryotic initiation factor 4E binding, calmodulin binding, collagen binding, insulin-like growth factor binding, lamin binding, profilin binding, tropomyosin binding, actin binding, peroxisome targeting sequence binding, SNARE binding, and cyclin binding.

[0952] Pharmaceutical compositions including such proteins or protein encoding sequences, antibodies directed against such proteins or polynucleotides capable of altering expression of such proteins, may be used to treat diseases which are associated with impaired protein binding. Antibodies and polynucleotides such as PCR primers and molecular probes designed to identify such proteins or protein encoding sequences may be used for diagnosis of such diseases.

[0953] Examples of such diseases include, but are not limited to, neurological and psychiatric diseases [J. Neurosci. 2003, 23(25):8788-99; Neurobiol. Dis. 2003, 14(1):146-56; J. Neurosci. 2003, 23(17):6956-64; Am. J. Pathol. 2003, 163(2):609-19], and cancerous diseases [Cancer Res. 2003, 63(15):4299-304; Semin. Thromb. Hemost. 2003, 29(3):247-58; Proc. Natl. Acad. Sci. USA. 2003, 100(16):9506-11].

[0954] Ligand Binding or Carrier Proteins:

[0955] The phrase “ligand binding or carrier proteins” refers to proteins involved in diverse biological function such as: pyridoxal phosphate binding, carbohydrate binding, magnesium binding, amino acid binding, cyclosporin A binding, nickel binding, chlorophyll binding, biotin biding, penicillin binding, selenium binding, tocopherol binding, binding, oxygen transporters, electron transporter, steroid binding, juvenile hormone binding, retinoid binding, heavy metal binding, calcium binding, protein binding, glycosaminoglycan binding, folate binding, odorant binding, lipopolysaccharide binding and nucleotide binding.

[0956] Pharmaceutical compositions including such proteins or protein encoding sequence, antibodies directed against such or polynucleotides capable of altering expression of such proteins, may be used to treat diseases which are associated with impaired function of these proteins. Antibodies and polynucleotides such as PCR primers and molecular probes designed to identify such proteins or protein encoding sequences may be used for diagnosis of such diseases.

[0957] Examples of such diseases include, but are not limited to, neurological disorders [J. Med. Genet. 2003, 40(10):733-40; J. Neuropathol. Exp. Neurol. 2003, 62(9):968-75; J. Neurochem. 2003, 87(2):427-36], autoimmune diseases (N. Engl. J. Med. 2003, 349(16):1526-33; JAMA. 2003, 290(13):1721-8]; gastroesophageal reflux disease [Dig. Dis. Sci. 2003, 48(9):1832-8], cardiovascular diseases [J. Vasc. Surg 2003, 38(4):827-32], cancerous diseases [Oncogene. 2003, 22(43):6699-703; Br. J. Haematol. 2003, 123(2):288-96], respiratory diseases [Circulation. 2003, 108(15):1839-44], and ophtalmic diseases [Ophthalmology. 2003, 110(10):2040-4; Am. J. Ophthalmol. 2003, 136(4): 729-32].

[0958] ATPases:

[0959] The term “ATPases” refers to enzymes that catalyze the hydrolysis of ATP to ADP, releasing energy that is used in the cell. This group include enzymes such as plasma membrane cation-transporting ATPase, ATP-binding cassette (ABC) transporter, magnesium-ATPase, hydrogen-/sodium-translcating ATPase or ATPase translocating any other elements, arsenite-transporting ATPase, protein-transporting ATPase, DNA translocase, P-type ATPase, and hydrolase, acting on acid anhydrides involved in cellular and subcellular movement.

[0960] Pharmaceutical compositions including such proteins or protein encoding sequences, antibodies directed against such proteins or polynucleotides capable of altering expression of such proteins, may be used to treat diseases which are associated with impaired conversion of the hydrolysis of ATP to ADP or resulting energy use. Antibodies and such and molecular probes designed to identify such proteins or protein encoding sequences may be used for diagnosis of such diseases.

[0961] Examples of such diseases include, but are not limited to, infectious diseases such as helicobacter pylori ulcers [BMC Gastroenterol. 2003, Nov. 6], Neurological, muscular and psychiatric diseases [Int. J. Neurosci. 2003, 13(12):1705-1717; Int. J. Neurosci. 2003, 113(11):1579-1591; Ann. Neurol. 2003, 54(4):494-500], Amyotrophic Lateral Sclerosis [Other Motor Neuron Discord. 2003 4(2):96-9], cardiovascular diseases [J. Nippon. Med. Sch. 2003, 70(5):384-92; Endocrinology. 2003, 144(10):478-83], metabolic diseases [Mol. Pathol. 2003, 56(5):302-4; Neurosci. Lett. 2003, 350(2):105-8], and peptic ulcer disease treated with inhibitors of the gastric H⁺—K⁺ ATPase (e.g. Omeprazole) responsible for acid secretion in the gastric mucosa.

[0962] Carboxylic Ester Hydrolases:

[0963] The phrase carboxylic ester hydrolases” refers to hydrolytic enzymes acting on carboxylic ester bonds such as N-acetylglucosaminylphosphatidylinositol deacetylase, 2-acetyl-1-alkylglycerophosphocholine esterase, aminoacyl-tRNA hydrolase, arylesterase, carboxylesterase, cholinesterase, gluconolactonase, sterol esterase, acetylesterase, carboxymethylenebutenolidase, protein-glutamate methylesterase, lipase, and 6-phosphogluconolactonase.

[0964] Pharmaceutical compositions including such proteins or protein encoding sequences, antibodies directed against such proteins or polynucleotides capable of altering expression of such proteins, may be used to treat diseases in which the hydrolytic cleavage of a covalent bond with accompanying addition of water (—H being added to one product of the cleavage and —OH to the other) is abnormal so that a beneficial effect may be achieved by modulation of such reaction. Antibodies and polynucleotides such as PCR primers and molecular probes designed to identify such proteins or protein encoding sequences may be used for diagnosis of such diseases.

[0965] Examples of such diseases include, but are not limited to, autoimmune neuromuscular disease Myasthenia Gravis, treated with cholinesterase inhibitors.

[0966] Hydrolase, Acting on Ester Bonds:

[0967] The phrase “hydrolase, acting on ester bonds” refers to hydrolytic enzymes acting on ester bonds such as nucleases, sulfuric ester hydrolase, carboxylic ester hydrolases, thiolester hydrolase, phosphoric monoester hydrolase, phosphoric diester hydrolase, triphosphoric monoester hydrolase, diphosphoric monoester hydrolase, and phosphoric triester hydrolase.

[0968] Pharmaceutical compositions including such proteins or protein encoding sequences, antibodies directed against such proteins or polynucleotides capable of altering expression of such proteins, may be used to treat diseases in which the hydrolytic cleavage of a covalent bond with accompanying addition of water (—H being added to one product of the cleavage and —OH to the other), is abnormal. Antibodies and polynucleotides such as PCR primers and molecular probes designed to identify such proteins or protein encoding sequences may be used for diagnosis of such diseases.

[0969] Hydrolases:

[0970] The term “hydrolases” refers to hydrolytic enzymes such as GPI-anchor transamidase, peptidases, hydrolases, acting on ester bonds, glycosyl bonds, ether bonds, carbon-nitrogen (but not peptide) bonds, acid anhydrides, acid carbon-carbon bonds, acid halide-bonds, acid phosphorus-nitrogen bonds, acid sulfur-nitrogen bonds, acid carbon-phosphorus bonds acid sulfur-sulfur bonds.

[0971] Pharmaceutical compositions including such proteins or protein encoding sequences, antibodies directed against such proteins or polynucleotides capable of altering expression of such proteins, may be used to treat diseases in which the hydrolytic cleavage of a covalent bond with accompanying addition of water (—H being added to one product of the cleavage and —OH to the other) is abnormal. Antibodies and polynucleotides such as PCR primers and molecular probes designed to identify such proteins or protein encoding sequences may be used for diagnosis of such diseases.

[0972] Examples of such diseases include, but are not limited to, cancerous diseases [Cancer. 2003, 98(9):1842-8; Cancer. 2003, 98(9):1822-9], neurological diseases such as Parkinson diseases [J. Neurol. 2003, 250 Suppl 3:III15-III24; J. Neurol. 2003, 250 Suppl 3:III2-III10], endocrinological diseases such as pancreatitis [Pancreas. 2003, 27(4):291-6] or childhood genetic diseases [Eur. J. Pediatr. 1997, 156(12):935-8], coagulation diseases [BMJ. 2003, 327(7421):974-7], cardiovascular diseases [Ann. Intern. Med. 2003, October 139(8):670-82], autoimmunity diseases [J. Med. Genet. 2003, 40(10):761-6] and metabolic diseases [Am. J. Hum. Genet. 2001, 69(5):1002-12].

[0973] Enzymes:

[0974] The term “enzymes” refers to naturally occurring or synthetic macromolecular substance composed mostly of protein, that catalyzes, to various degree of specificity, at least one (bio)chemical reactions at relatively low temperatures. The action of RNA that has catalytic activity (ribozyme) is often also regarded as enzymatic. Nevertheless, enzymes are mainly “proteinaceous and are often easily inactivated by heating or by protein-denaturing agents. The substances upon which they act are known as substrates, for which the enzyme possesses a specific binding or active site.

[0975] The group of enzymes include various proteins possessing enzymatic activities such as mannosylphosphate transferase, para-hydroxybenzoate:polyprenyltransferase, rieske iron-sulfur protein, imidazoleglycerol-phosphate synthase, sphingosine hydroxylase, tRNA 2′-phosphotransferase, sterol C-24(28) reductase, C-8 sterol isomerase, C-22 sterol desaturase, C-14 sterol reductase, C-3 sterol dehydrogenase (C-4 sterol decarboxylase), 3-keto sterol reductase, C-4 methyl sterol oxidase, dihydroricotinamide riboside quinone reductase, glutamate phosphate reductase, DNA repair enzyme, telomerase, α-ketoacid dehydrogenase, β-alanyl-dopamine synthase, RNA editase, aldo-keto reductase, alkylbase DNA glycosidase, glycogen debranching enzyme, dihydropterin deaminase, dihydropterin oxidase, dimethylnitrosamine demethylase, ecdysteroid UDP-glucosyl/UDP glucuronosyl transferase, glycine cleavage system, helicase, histone deacetylase, mevaldate reductase, monooxygenase, poly(AP-ribose) glycohydrolase, pyruvate dehydrogenase, serine esterase, sterol carrier protein X-related thiolase, transposase, tyramine-β hydroxylase, para-aminobenzoic acid (PABA) synthase, glu-tRNA(gln) amidotransferase, molybdopterin cofactor sulfurase, lanosterol 14-α-demethylase, aromatase, 4-hydroxybenzoate octaprenyltransferase 7,8-dihydro-8-oxoguanine-triphosphatase, CDP-alcohol phosphotransferase, 2,5-diamino-6-(ribosylamino)-4(3H)-pyrimidonone 5′-phosphate deaminase, diphosphoinositol polyphosphate phosphohydrolase, γ-glutamyl carboxylase, small protein conjugating enzyme, small protein activating enzyme, 1-deoxyxylulose-5-phosphate synthase, 2′-phosphotransferase, 2-octoprenyl-3-methyl-6-methoxy-1,4-benzoquinone hydroxylase, 2C-Methyl-D-erythritol 2,4-cyclodiphosphate synthase, 3,4 dihydroxy-2-butanone-4-phosphate synthase, 4-amino-4-deoxychorismate lyase, 4-diphosphocytidyl-2C-methyl-D-erythritol synthase, ADP-L-glycero-D-manno-heptose synthase, D-erythro-7,8-dihydroneopterin triphosphate 2′-epimerase, N-ethylmaleimide reductase, O-antigen ligase, O-antigen polymerase, UDP-2,3-diacylglucosamine hydrolase, arsenate reductase, carnitine racemase, cobalamin [5′-phosphate] synthase, cobinamide phosphate, guanylyltransferase, enterobactin synthetase, enterochelin esterase, enterochelin synthetase, glycolate oxidase, integrase, lauroyl transferase, peptidoglycan synthase, phosphopantetheinyltransferase, phosphoglucosamine mutase, phosphoheptose isomerase, quinolinate synthase, siroheme synthase, N-acylmannosamine-6-phosphate 2-epimerase, N-acetyl-anhydromuramoyl-L-alanine amidase, carbon-phosphorous lyase, heme-copper terminal oxidase, disulfide oxidoreductase, phthalate dioxygenase reductase, sphingosine-1-phosphate lyase, molybdopterin oxidoreductase, dehydrogenase, NADPH oxidase, naringenin-chalcone synthase, N-ethylammeline chlorohydrolase, polyketide synthase, aldolase, kinase, phosphatase, CoA-ligase, oxidoreductase, transferase, hydrolase, lyase, isomerase, ligase, ATPase, sulfhydryl oxidase, lipoate-protein ligase, δ-1-pyrroline-5-carboxyate synthetase, lipoic acid synthase, and tRNA dihydrouridine synthase.

[0976] Pharmaceutical compositions including such proteins or protein encoding sequences, antibodies directed against such proteins or polynucleotides capable of altering expression of such proteins, may be used to treat diseases which can be ameliorated by modulating the activity of various enzymes which are involved both in enzymatic processes inside cells as well as in cell signaling. Antibodies and polynucleotides such as PCR primers and molecular probes designed to identify such proteins or protein encoding sequences may be used for diagnosis of such diseases.

[0977] Cytoskeletal Proteins:

[0978] The term “cytoskeletal proteins” refers to proteins involved in the structure formation of the cytoskeleton.

[0979] Pharmaceutical compositions including such proteins or protein encoding sequences, antibodies directed against such proteins or polynucleotides capable of altering expression of such proteins, may be used to treat diseases which are caused or due to abnormalities in cytoskeleton, including cancerous cells, and diseased cells such as cells that do not propagate, grow or function normally. Antibodies and polynucleotides such as PCR primers and molecular probes designed to identify such proteins or protein encoding sequences may be used for diagnosis of such diseases.

[0980] Examples of such diseases include, but are not limited to, liver diseases such as cholestatic diseases [Lancet. 2003, 362(9390):1112-9], vascular diseases [J. Cell Biol. 2003, 162(6):1111-22], endocrinological diseases [Cancer Res. 2003, 63(16):4836-41], neuromuscular disorders such as muscular dystrophy [Neuromuscul. Discord. 2003, 13(7-8):579-88], or myopathy [Neuromuscul. Discord. 2003, 13(6):456-67] neurological disorders such as Alzheimer's disease [J. Alzheimers Dis. 2003, 5(3):209-28], cardiac disorders [J. Am. Col. Cardiol. 2003, 42(2):319-27], skin disorders [J. Am. Coll. Cardiol. 2003, 42(2):319-27], and cancer [Proteomics. 2003, 3(6):979-90].

[0981] Structural Proteins:

[0982] The term “structural proteins” refers to proteins involved in the structure formation of the cell, such as structural proteins of ribosome, cell wall structural proteins, structural proteins of cytoskeleton, extracellular matrix structural proteins, extracellular matrix glycoproteins, amyloid proteins, plasma proteins, structural proteins of eye lens, structural protein of chorion (sensu Insecta), structural protein of cuticle (sensu Insecta), puparial glue protein (sensu Diptera), structural proteins of bone, yolk proteins, structural proteins of muscle, structural protein of vitelline membrane (sensu Insecta), structural proteins of peritrophic membrane (sensu Insecta), and structural proteins of nuclear pores.

[0983] Pharmaceutical compositions including such proteins or protein encoding sequences, antibodies directed-against such proteins or polynucleotides capable of altering expression of such proteins, may be used to treat diseases which are caused by abnormalities in cytoskeleton, including cancerous cells, and diseased cells such as cells that do not propagate, grow or function normally. Antibodies and polynucleotides such as PCR primers and molecular probes designed to identify such proteins or protein encoding sequences may be used for diagnosis of such diseases.

[0984] Examples of such diseases include, but are not limited to, blood vessels diseases such as aneurysms [Cardiovasc. Res. 2003, 60(1):205-13], joint diseases [Rheum. Dis. Clin. North Am. 2003, 29(3):6311-45], muscular diseases such as a muscular dystrophies [Curr. Opin. Clin. Nutr. Metab. Care. 2003, 6(4):435-9], neuronal diseases such as encephalitis [Neurovirol. 2003, 9(2):274-83], retinitis pigmentosa [Dev. Ophthalmol. 2003, 37:109-25], and infectious diseases [J. Virol. Methods. 2003, 109(1):75-83; FEMS Immunol. Med. Microbiol. 2003, 35(2):125-30; J. Exp. Med. 2003, 197(5):633-42].

[0985] Ligands:

[0986] The term “ligands” Prefers to proteins that bind to another chemical entity to form a larger complex, involved in various biological processes, such as signal transduction, metabolism, growth and differentiation, etc. This group of proteins includes opioid peptides, baboon receptor ligand, branchless receptor ligand, breathless receptor ligand, ephrin, frizzled receptor ligand, frizzled-2 receptor ligand, heartless receptor ligand, Notch receptor ligand, patched receptor ligand, punt receptor ligand, Ror receptor ligand, saxophone receptor ligand, SE20 receptor ligand, sevenless receptor ligand, smooth receptor ligand, thickveins receptor ligand, Toll receptor ligand, Torso receptor ligand, death receptor ligand, scavenger receptor ligand, neuroligin, integrin ligand, hormones, pheromones, growth factors, and sulfonylurea receptor ligand.

[0987] Pharmaceutical compositions including such proteins or protein encoding sequences, antibodies directed against such proteins or polynucleotides capable of altering expression of such proteins, may be used to treat diseases involved in impaired hormone function or diseases which involve abnormal secretion of proteins which may be due to abnormal presence, absence or impaired normal response to normal levels of secreted proteins. Those secreted proteins include hormones, neurotransmitters, and various other proteins secreted by cells to the extracellular environment. Antibodies and polynucleotides such as PCR primers and molecular probes designed to identify such proteins or protein encoding sequences may be used for diagnosis of such diseases.

[0988] Examples of such diseases include, but are not limited to, analgesia inhibited by orphanin FQ/nociceptin [Shane R., et al., (2001) Brain Res., 907(1-2):109-16], stroke protected by estrogen [Alkayed N., (2001) J. Neurosci., 21(19):7543-50], atherosclerosis associated with growth hormone deficiency [Elhadd T. A., et al., (2001) J. Clin. Endocrinol. Metab., 86(9):4223-32], diabetes inhibited by α-galactosylceramide [Hong S., et al., (2001) Nat. Med., 7(9):1052-6], and Huntington's disease associated with huntingtin deficiency [Rao D. S., et al., (2001) Mol. Cell. Biol., 21(22):7796-806].

[0989] Signal Transducer:

[0990] The term “signal transducers” refers to proteins such as activin inhibitors receptor-associated proteins, α-2 macroglobulin receptors, morphogens, quorum sensing signal generators, quorum sensing response regulators, receptor signaling proteins, ligands, receptors, two-component sensor molecules, and two-component response regulators.

[0991] Pharmaceutical compositions including such proteins or protein encoding sequences, antibodies directed against such proteins or polynucleotides capable of altering expression of such proteins, may be used to treat diseases in which the signal-transduction is impaired, either as a cause, or as a result of the disease. Antibodies and polynucleotides such as PCR primers and molecular probes designed to identify such proteins or protein encoding sequences may be used for diagnosis of such diseases.

[0992] Examples of such diseases include, but are not limited to, altered sexual dimorphism associated with signal transducer activator of transcription 5[Udy G. B., et al., (1997) Proc. Natl. Acad. Sci. USA, 94(14):7239-44], multiple sclerosis associated with sgp130 deficiency [Padberg F., et al., (1999) J. Neuroimmunol., 99(2):218-23], intestinal inflammation associated with elevated signal transducer and activator of transcription 3 activity [Suzuki A., et al., (2001) J Exp Med, 193(4):471-81], carcinoid tumor inhibited by increased signal transducer and activators of transcription 1 and 2 [Zhou Y., et al., (2001) Oncology, 60(4):330-8], and esophageal cancer associated with loss of EGF-STAT1 pathway [Watanabe G., et al., (2001) Cancer J., 7(2):132-9].

[0993] RNA Polymerase II Transcription Factors:

[0994] The phrase “RNA polymerase II transcription factors” refers to proteins such as specific and non-specific RNA polymerase II transcription factors, enhancer binding, ligand-regulated transcription factor, and general RNA polymerase II transcription factors.

[0995] Pharmaceutical compositions including such proteins or protein encoding sequences, antibodies directed against such proteins or polynucleotides capable of altering expression of such proteins, may be used to treat diseases involving impaired function of RNA polymerase II transcription factors. Antibodies and polynucleotides such as PCR primers and molecular probes designed to identify such proteins or protein encoding sequences may be used for diagnosis of such diseases.

[0996] Examples of such diseases include, but are not limited to, cardiac diseases [Cell Cycle. 2003, 2(2):99-104], xeroderma pigmentosum: [Bioessays. 2001, 23(8):671-3; Biochim. Biophys. Acta. 1997, 1354(3):241-51], muscular atrophy [J. Cell Biol. 2001, 152(1):75-85], neurological diseases such as Alzheimer's disease [Front Biosci. 2000, 5:D244-57], cancerous diseases such as breast cancer [Biol. Chem. 1999, 380(2):117-28], and autoimmune disorders [Clin. Exp. Immunol. 1997, 109(3):488-94].

[0997] RNA Binding Proteins:

[0998] The phrase “RNA binding proteins” refers to RNA binding proteins involved in splicing and translation regulation such as tRNA binding proteins, RNA helicases, double-stranded RNA and single-stranded RNA binding proteins, mRNA binding proteins, snRNA binding proteins, 5S RNA and 7S RNA binding proteins, poly-pyrimidine tract binding proteins, snRNA binding proteins, and AU-specific RNA binding proteins.

[0999] Pharmaceutical compositions including such proteins or protein encoding sequences, antibodies directed against such proteins or polynucleotides capable of altering expression of such proteins, may be used to treat diseases involving transcription and translation factors such as helicases, isomerases, histones and nucleases, diseases where there is impaired transcription, splicing, post-transcriptional processing, translation or stability of the RNA. Antibodies and polynucleotides such as PCR primers and molecular probes designed to identify such proteins or protein encoding sequences may be used for diagnosis of such diseases.

[1000] Examples of such diseases include, but are not limited to, cancerous diseases such as lymphomas [Tumori. 2003, 89(3):278-84], prostate cancer [Prostate. 2003, 57(1):80-92] or lung cancer [J. Pathol. 2003, 200(5):640-6], blood diseases, such as fanconi anemia [Curr. Hematol. Rep. 2003, 2(4):335-40], cardiovascular diseases such as atherosclerosis [J. Thromb. Haemost. 2003, 1(7):1381-90] muscle diseases [Trends Cardiovasc. Med. 2003, 3(5):188-95] and brain and neuronal diseases [Trends Cardiovasc. Med. 2003, 13(5):188-95; Neurosci. Lett. 2003, 342(1-2):41-4].

[1001] Nucleic Acid Binding Proteins:

[1002] The phrase “nucleic acid binding proteins” refers to proteins involved in RNA and DNA synthesis and expression regulation such as transcription factors, RNA and DNA binding proteins, zinc fingers, helicase, isomerase, histones, nucleases, ribonucleoproteins, and transcription and translation factors.

[1003] Pharmaceutical compositions including such proteins or protein encoding sequences, antibodies directed against such proteins or polynucleotides capable of altering expression of such proteins, may be used to treat diseases involving DNA or RNA binding proteins such as helicases, isomerases, histones and nucleases, for example diseases where there is abnormal replication or transcription of DNA and RNA respectively. Antibodies and polynucleotides such as PCR primers and molecular probes designed to identify such proteins or protein encoding sequences may be used for diagnosis of such diseases.

[1004] Examples of such diseases include, but are not limited to, neurological diseases such as renitis pigmentoas [Am. J. Ophthalmol. 2003, 136(4):678-87] parkinsonism [Proc. Natl. Acad. Sci. USA. 2003, 100(18):10347-52], Alzheimer [J. Neurosci. 2003, 23(17):6914-27] and canavan diseases [Brain Res Bull. 2003, 61(4):427-35], cancerous diseases such as leukemia [Anticancer Res. 2003, 23(4):3419-26] or lung cancer [J. Pathol. 2003, 200(5):640-6], miopathy [Neuromuscul Disord. 2003, 13(7-8):559-67] and liver diseases [J. Pathol. 2003, 200(5):553-60].

[1005] Proteins Involved in Metabolism:

[1006] The phrase “proteins involved in metabolism” refers to proteins involved in the totality of the chemical reactions and physical changes that occur in living organisms, comprising anabolism and catabolism; may be qualified to mean the chemical reactions and physical processes undergone by a particular substance, or class of substances, in a living organism. This group includes proteins involved in the reactions of cell growth and maintenance such as metabolism resulting in cell growth carbohydrate metabolism, energy pathways, electron transport, nucleobase, nucleoside, nucleotide and nucleic acid metabolism, protein metabolism and modification, amino acid and derivative metabolism, protein targeting, lipid metabolism, aromatic compound metabolism, one-carbon compound metabolism, coenzymes and prosthetic group metabolism, sulfur metabolism, phosphorus metabolism, phosphate metabolism, oxygen and radical metabolism, xenobiotic metabolism, nitrogen metabolism, fat body metabolism (sensu Insecta), protein localization, catabolism, biosynthesis, toxin metabolism, methylglyoxal metabolism, cyanate metabolism, glycolate metabolism, carbon utilization and antibiotic metabolism.

[1007] Pharmaceutical compositions including such proteins or protein encoding sequences, antibodies directed against such proteins or polynucleotides capable of altering expression of such proteins, may be used to treat diseases involving cell metabolism. Antibodies and polynucleotides such as PCR primers and molecular probes designed to identify such proteins or protein encoding sequences may be used for diagnosis of such diseases.

[1008] Examples of such metabolism-related diseases include, but are not limited to, multisystem mitochondrial disorder caused by mitochondrial DNA cytochrome C oxidase II deficiency. [Campos Y., et al., (2001) Ann. Neurol. 50(3):409-13], conduction defects and ventricular dysfunction in the heart associated with heterogeneous connexin43 expression [Gutstein D. E., et al., (2001) Circulation, 104(10):1194-9], atherosclerosis associated with growth suppressor p27 deficiency [Diez-Juan A., and Andres V. (2001) FASEB J., 15(11):1989-95], colitis associated with glutathione peroxidase deficiency [Esworthy R. S., et al., (2001) Am. J. Physiol. Gastrointest. Liver Physiol., 281(3):G848-55], systemic lupus erythematosus associated with deoxyribonuclease I deficiency [Yasutomo K., et al., (2001) Nat. Genet., 28(4):313-4], alcoholic pancreatitis [Pancreas. 2003, 27(4):281-5], amyloidosis and diseases that are related to amyloid metabolism, such as FMF, atherosclerosis, diabetes, and especially diabetes long term consequences, neurological diseases such as Creutzfeldt-Jakob disease, and Parkinson or Rasmussen's encephalitis.

[1009] Cell Growth and/or Maintenance Proteins:

[1010] The phrase “Cell growth and/or maintenance proteins” refers to proteins involved in any biological process required for cell survival, growth and maintenance, including proteins involved in biological processes such as cell organization and biogenesis, cell growth, cell proliferation, metabolism, cell cycle, budding, cell shape and cell size control, sporulation (sensu Saccharomyces), transport, ion homeostasis, autophagy, cell motility, chemi-mechanical coupling, membrane fusion, cell-cell fusion, and stress response.

[1011] Pharmaceutical compositions including such proteins or protein encoding sequences, antibodies directed against such proteins or polynucleotides capable of altering expression of such proteins, may be used to treat or prevent diseases such as cancer, degenerative diseases, for example neurodegenerative diseases or conditions associated with aging or alternatively, diseases wherein apoptosis which should have taken place, does not take place. Antibodies and polynucleotides such as PCR primers and molecular probes designed to identify such proteins or protein encoding sequences may be used for diagnosis of such diseases, detection of pre-disposition to a disease, and determination of the stage of a disease.

[1012] Examples of such diseases include, but are not limited to, ataxia-telangiectasia associated with ataxia-telangiectasia mutated deficiency [Hande et al., (2001) Hum. Mol. Genet., 10(5):519-28], osteoporosis associated with osteonectin deficiency [Delany et al., (2000) J. Clin. Invest., 105(7):91.5-23], arthritis caused by membrane-bound matrix metalloproteinase deficiency [Holmbeck et al., (1999) Cell, 99(1):81-92], defective stratum corneum and early neonatal death associated with transglutaminase 1 deficiency [Matsuki et al., (11998) Proc. Natl. Acad. Sci. USA, 95(3):1044-9], and Alzheimer's disease associated with estrogen [Simpkins et al., (1997) Am. J. Med., 103(3A):19S-25S].

[1013] Chaperones

[1014] Information derived from proteins such as ribosomal chaperone, peptidylprolyl isomerase, lectin-binding chaperone, nucleosome assembly chaperone chaperonin ATPase, cochaperone, heat shock protein, HSP70/HSP90 organizing protein fimbrial chaperone, metallochaperone, tubulin folding, HSC7-interacting protein can be used to diagnose/treat diseases involving pathological conditions, which are associated with non-normal protein activity or structure. Biding of the products of the proteins of this family, or antibodies reactive therewith, can modulate a plurality of protein activities as well as change protein structure. Alternatively, diseases in which there is abnormal degradation of other proteins, which may cause non-normal accumulation of various proteinaceous products in cells, caused non-normal prolonged or shortened) activity of proteins, etc.

[1015] Example of diseases that involve chaperones are cancerous diseases, such as prostate cancer (Semin Oncol. 2003 October; 30(5):709-16.); infectious diseases, such as prion infection (EMBO J. 2003 Oct. 15; 22(20):5435-5445.); neurological syndromes (J Neuropathol Exp Neurol. 2003 July; 62(7):751-64; Antioxid Redox Signal. 2003 June; 5(3):337-48; J. Neurochem. 2003 July; 86(2):394-404.)

[1016] Variants of Proteins which Accumulate an Element/Compound

[1017] Variant proteins which their wild type version naturally binds a certain compound or element inside the cell for storage of accumulation may have terapoetic effect as secreted variants. Ferritin, accumulates iron inside the cells. A secreted variant of this protein is expected to bind plasma iron, reduce its levels and therefore have a desired therapeutic effect in the syndrome of Hemosiderosis characterized by high levels of iron in the blood.

### Diseases that May be Treated/Diagnosed Using the Biomolecular Sequences of the Present Invention

[1018] Inflammatory Diseases

[1019] Examples of inflammatory diseases include, but are not limited to, chronic inflammatory diseases and acute inflammatory diseases.

[1020] Inflammatory Diseases Associated with Hypersensitivity

[1021] Examples of hypersensitivity include, but are not limited to, Types I-IV hypersensitivity, immediate hypersensitivity, antibody mediated hypersensitivity immune complex mediated hypersensitivity, T lymphocyte mediated hypersensitivity and DTH. An example of type I or immediate hypersensitivity is asthma. Examples of type II hypersensitivity include, but are not limited to, rheumatoid diseases, rheumatoid autoimmune diseases, rheumatoid arthritis [Krenn V et al., Histol Histopathol 2000 July; 15 (3):791], spondylitis, ankylosing spondylitis [Jan Voswinkel et al., Arthritis Res 2001; 3 (3): 189], systematic diseases, systemic autoimmune diseases, systemic lupus erythematosus [Erikson J. et al., Immunol Res 1998; 17 (1-2):49], sclerosis, systemic sclerosis [Renaudineau Y. et al., Clin Diagn Lab Immunol. 1999 March; 6 (2):156; Chan O T. et al., Immunol Rev 1999 June; 169:107], glandular diseases, glandular autoimmune diseases, pancreatic autoimmune diseases, diabetes, Type I diabetes [Zimmet P. Diabetes Res Clin Pract 1996 October; 34 Suppl:S125], thyroid diseases, autoimmune thyroid diseases, Graves' disease [Orgiazzi J. Endocrinol Metab Clin North Am 2000 June; 29 (2):339], thyroiditis, spontaneous autoimmune thyroiditis [Braley-Mullen H. and Yu S, J Immunol 2000 Dec. 15; 165 (12):7262], Hashimoto's thyroiditis [Toyoda N. et al., Nippon Rinsho 1999 August; 57 (8):1810], myxedema, idiopathic myxedema [Mitsuma T. Nippon Rinsho. 1999 August; 57 (8):1759]; autoimmune reproductive diseases, ovarian diseases, ovarian autoimmunity [Garza K M. et al., J Reprod Immunol 1998 February; 37 (2):87], autoimmune anti-sperm infertility [Diekman A B. et al., Am J Reprod Immunol. 2000 March; 43 (3):134], repeated fetal loss [Tincani A. et al. Lupus 1998; 7 Suppl 2:S107-9], neurodegenerative diseases, neurological diseases, neurological autoimmune diseases, multiple sclerosis [Cross A H. et al., J Neuroimmunol 2001 Jan. 1; 112 (1-2)-1], Alzheimer's disease [Oron L. et al., J Neural Transm Suppl. 1997; 49:77], myasthenia gravis [Infante A J. and Kraig E, Int Rev Immunol 1999; 18 (1-2):83], motor neuropathies [Kornberg A J. J Clin Neurosci. 2000 May; 7 (3):191], Guillain-Barre syndrome, neuropathies and autoimmune, neuropathies [Kusunoki S. Am J Med Sci. 2000 April; 319 (4):234], myasthenic diseases, Lambert-Eaton myasthenic syndrome [Takamori M. Am J Med Sci. 2000 April; 3319 (4):204], paraneoplastic neurological diseases, cerebellar atrophy, paraneoplastic cerebellar atrophy, non-paraneoplastic stiff man syndrome, cerebellar atrophies, progressive cerebellar atrophies, encephalitis, Rasmussen's encephalitis, amyotrophic lateral sclerosis, Sydeham chorea, Gilles de la Tourette syndrome, polyendocrinopathies, autoimmune polyendocrinopathies [Antoine J C. and Honnorat J. Rev Neurol (Paris) 2000 January; 156 (1):23], neuropathies, dysimmune neuropathies [Nobile-Orazio E. et al., Electroencephalogr Clin Neurophysiol Suppl 1999; 50:419], neuromyotonia, acquired neuromyotonia, arthrogryposis multiplex congenita [Vincent A. et al., Ann NY Acad Sci. 1998 May 13; 841:482], cardiovascular diseases, cardiovascular autoimmune diseases, atherosclerosis [Matsuura E. et al., Lupus. 1998; 7 Suppl-2:S135], myocardial infarction [Vaarala O. Lupus. 1998; 7 Suppl 2:S132], thrombosis [Tincani A. et al., Lupus 1998; 7 Suppl 2:S107-9], granulomatosis, Wegener's granulomatosis, arteritis, Takayasu's arteritis and Kawasaki syndrome [Praprotnik S. et al., Wien Klin Wochenschr 2000 Aug. 25; 112 (15-16):660], anti-factor VIII autoimmune disease [Lacroix-Desmazes S. et al., Semin Thromb Hemost 2000; 26 (2): 157], vasculitises, necrotizing small vessel vasculitises, microscopic polyangiitis, Churg and Strauss syndrome, glomerulonephritis, pauci-immune focal necrotizing glomerulonephritis, crescentic glomerulonephritis [Noel. L H. Ann. Med Interne (Paris). 2000 May; 151 (3):178], antiphospholipid syndrome [Flamholz R. et al., J Clin Apheresis 1999; 14 (4):171], heart failure, agonist-like β-adrenoceptor antibodies in heart failure [Wallukat G. et al., Am J Cardiol. 1999 Jun. 17; 83 (12A):75H], thrombocytopenic purpura [Moccia F. Ann Ital Med Int. 1999 April-June; 14 (2):114], hemolytic anemia, autoimmune hemolytic anemia [Efremov D G. et al.; Leuk Lymphoma 1998 January; 28 (3-4):285], gastrointestinal diseases, autoimmune diseases of the gastrointestinal tract, intestinal diseases, chronic inflammatory intestinal disease [Garcia Herola A. et al., Gastroenterol Hepatol. 2000 January; 23 (1): 16], celiac disease. [Landau Y E. and Shoenfeld Y. Harefuah 2000 Jan. 16; 138 (2):122], autoimmune diseases of the musculature, myositis, autoimmune myositis, Sjogren's syndrome [Feist E. et. al., Int Arch Allergy Immunol 2000 September; 123 (1):92], smooth muscle autoimmune disease [Zauli D. et al., Biomed Pharmacother 1999 June; 53 (5-6):234], hepatic diseases, hepatic autoimmune diseases, autoimmune hepatitis. [Manns M P. J Hepatol 2000 August; 33 (2):326] and primary biliary cirrhosis [Strassburg C P. et al., Eur J Gastroenterol Hepatol. 1999 June; 11 (6):595].

[1022] Examples of type IV or T cell mediated hypersensitivity, include, but are not limited to, rheumatoid diseases, rheumatoid arthritis [Tisch R, McDevitt H O. Proc Natl Acad Sci USA 1994 Jan. 18; 91 (2):437], systemic diseases, systemic autoimmune diseases, systemic lupus erythematosus [Datta S K., Lupus 1998; 7 (9):591], glandular diseases, glandular autoimmune diseases, pancreatic diseases, pancreatic autoimmune diseases, Type 1 diabetes [Castano L. and Eisenbarth G S. Ann. Rev. Immunol. 8:647], thyroid diseases, autoimmune thyroid diseases, Graves' disease [Sakata S. et al., Mol Cell Endocrinol 1993 March; 92 (1):77], ovarian diseases [Garza K M. et al., J Reprod Immunol 1998 February; 37(2):87], prostatitis, autoimmune prostatitis [Alexander R B. et al., Urology 1997 December; 50 (6):893], polyglandular syndrome, autoimmune polyglandular syndrome, Type I autoimmune polyglandular syndrome [Hara T. et al., Blood. 1991 Mar. 1; 77 (5):1127], neurological diseases, autoimmune neurological diseases, multiple sclerosis, neuritis, optic neuritis [Soderstrom M. et al., J Neurol Neurosurg Psychiatry 1994 May; 57 (5):544], myasthenia gravis [Oshima M. et al., Eur J Immunol 1990 December; 20 (12):2563], stiff-man syndrome [Hiemstra H S. et al., Proc Natl Acad Sci USA 2001 Mar. 27; 98 (7):3988], cardiovascular diseases, cardiac, autoimmunity in Chagas' disease [Cunha-Neto E. et al., J Clin Invest 1996 Oct. 15; 98 (8):1709], autoimmune thrombocytopenic purpura [Semple J W. et al., Blood 1996 May 15; 87 (10):4245], anti-helper T lymphocyte autoimmunity [Caporossi A P. et al., Viral Immunol 1998; 11 (1):9], hemolytic anemia [Sallah S. et al., Ann Hematol 1997 March; 74 (3):139], hepatic diseases, hepatic autoimmune diseases, hepatitis, chronic active hepatitis [Franco A. et al., Clin Immunol Immunopathol 1990 March; 54 (3):382], biliary cirrhosis, primary biliary cirrhosis [Jones D E. Clin Sci (Colch) 1996 November; 91 (5):551], nephric diseases, nephric autoimmune diseases, nephritis, interstitial nephritis [Kelly C J. J Am Soc Nephrol 1990 August; 1 (2):140], connective tissue diseases, ear diseases, autoimmune connective tissue diseases, autoimmune ear disease [Yoo T J. et al., Cell Immunol 1994 August; 157 (1):249], disease of the inner ear [Gloddek B. et al., Ann NY Acad Sci 1997 Dec. 29; 830:266], skin diseases cutaneous diseases, dermal diseases, bullous skin diseases, pemphigus vulgaris, bullous pemphigoid and pemphigus foliaceus.

[1023] Examples of delayed type hypersensitivity include, but are not limited to, contact dermatitis and drug eruption.

[1024] Autoimmune Diseases

[1025] Examples of autoimmune diseases include, but are not limited to, cardiovascular diseases, rheumatoid diseases, glandular diseases, gastrointestinal diseases, cutaneous diseases, hepatic diseases, neurological diseases, muscular diseases, nephric diseases related to reproduction, connective tissue diseases and systemic diseases.

[1026] Examples of autoimmune cardiovascular and blood diseases include, but are not limited to atherosclerosis [Matsuura E. et al., Lupus. 1998; 7. Suppl. 2:S135], myocardial infarction [Vaarala O. Lupus. 1998; 7-Suppl 2:S132], thrombosis [Tincani A. et al., Lupus. 1998; 7 Suppl 2:S107-9], Wegener's granulomatosis, Takayasu's arteritis, Kawasaki syndrome [Praprotnik S. et al., Wien Klin Wochenschr 2000 Aug. 25; 112 (15-16):660], anti-factor VIII autoimmune disease [Lacroix-Desmazes S. et al., Semin Thromb Hemost. 2000; 26 (2): 157], necrotizing small vessel vasculitis, microscopic polyangiitis, Churg and Strauss syndrome, pauci-immune focal necrotizing and crescentic glomerulonephritis [Noel L H. Ann Med Interne (Paris). 2000 May; 151 (3):178], antiphospholipid syndrome [Flamholz R. et al., J. Clin Apheresis 1999; 14 (4): 171], antibody-induced heart failure [Wallukat G et al., J Cardiol. 1999 Jun. 17; 83 (12A):75H], thrombocytopenic purpura 4[Moccia F. Ann Ital Med Int. 1999 April-June; 14 (2):114; Semple J W. et al., Blood 1996 May 15; 87 (10):4245], autoimmune hemolytic anemia [Efremov D G. et. al., Leuk Lymphoma 1998 January; 28 (3-4):285; Sallah S. et al., Ann Hematol. 1997 March; 74 (3):139], cardiac autoimmunity in Chagas' disease [Cunha-Neto E. et al., J Clin Invest 1996 Oct. 15; 98 (8):1709) and anti-helper T lymphocyte autoimmunity [Caporossi A P. et al., Viral Immunol 1998; 11 (1):9].

[1027] Examples of autoimmune rheumatoid diseases include, but are not limited to rheumatoid arthritis [Krenn V. et al., Histol Histopathol 2000 July; 15 (3):791; Tisch R, McDevitt H O. Proc Natl Acad Sci units S A 1994 Jan. 18; 91 (2):437) and ankylosing spondylitis [Jan Voswinkel et al., Arthritis Res 2001; 3 (3): 189].

[1028] Examples of autoimmune glandular diseases include, but are not limited to, pancreatic disease, Type I diabetes, Type II diabetes, thyroid disease, Graves' disease, thyroiditis, spontaneous autoimmune thyroiditis, Hashimoto's thyroiditis, idiopathic myxedema, ovarian autoimmunity, autoimmune anti-sperm infertility, autoimmune, prostatitis and Type I autoimmune polyglandular syndrome diseases include, but are not limited to autoimmune diseases of the pancreas, Type 1 diabetes [Castano L. and Eisenbarth G S. Ann. Rev. Immunol. 8:647; Zimmet P. Diabetes Res Clin Pract 1996 October; 34 Suppl:S125], autoimmune thyroid diseases, Graves' disease [Orgiazzi J. Endocrinol Metab Clin North Am 2000 June; 29 (2):339; Sakata S. et al., Mol Cell Endocrinol 1993 March; 92(1):77], spontaneous autoimmune thyroiditis [Braley-Mullen H. and Yu S, J Immunol 2000 Dec. 15; 165 (112):7262], Hashimoto's thyroiditis. [Toyoda N. et al., Nippon Rinsho. 1999 August; 57 (8):1810], idiopathic myxedema [Mitsuma T. Nippon Rinsho. 1999 August; 57 (8):1759], ovarian autoimmunity [Garza K M. et al., J Reprod Immunol 1998 February; 37 (2):87], autoimmune anti-sperm infertility [Diekman A B. et al., Am J Reprod Immunol. 2000 March; 43 (3):134], autoimmune prostatitis [Alexander R B. et al., Urology 1997 December; 50 (6):893) and Type I autoimmune polyglandular syndrome [Hara T. et al., Blood. 1991 Mar. 1; 77 (5):1127].

[1029] Examples of autoimmune gastrointestinal diseases include but are not limited to, chronic inflammatory intestinal diseases [Garcia Herola A. et al., Gastroenterol Hepatol. 2000 January; 23 (1):16], celiac disease [Landau Y E. and Shoenfeld Y. Harefuah 2000 Jan. 16; 138 (2):122], colitis, ileitis and Crohn's disease and ulcerative colitis.

[1030] Examples of autoimmune cutaneous diseases include, but are not limited to, autoimmune bullous skin diseases, such as, but are not limited to, pemphigus vulgaris, bullous pemphigoid and pemphigus foliaceus.

[1031] Examples of autoimmune hepatic diseases include, but are not limited to, hepatitis, autoimmune chronic active hepatitis [Franco A. et al., Clin Immunol Immunopathol 1990 March; 54 (3):382], primary biliary cirrhosis [Jones D E. Clin Sci (Colch) 1996 November; 91 (5):551; Strassburg C P. et al., Eur J Gastroenterol Hepatol. 1999 June; 11 (6):595) and autoimmune hepatitis [Manns M P. J Hepatol 2000 August; 33 (2):326].

[1032] Examples of autoimmune neurological diseases include, but are not limited to, multiple sclerosis [Cross A H. et al., J. Neuroimmunol 2001 Jan. 1; 112 (1-2):1], Alzheimer's disease [Oron L. et al., J Neural Transm Suppl. 1997; 49:77], myasthenia gravis [Infante A J. and Kraig E, Int Rev Immunol 1999; 18 (1-2):83; Oshima M. et al., Eur J Immunol 1990 December; 20 (12):2563], neuropathies, motor neuropathies [Kornberg A J. J Clin Neurosci. 2000 May; 7 (3) 191], Guillain-Barre syndrome and autoimmune neuropathies: [Kusunoki S. Am J Med Sci. 2000 April; 319, (4):234], myasthenia, Lambert-Eaton myasthenic syndrome [Takamori M. Am J Med Sci. 2000 April; 319 (4):204], paraneoplastic neurological diseases, cerebellar atrophy, paraneoplastic cerebellar atrophy and stiff-man syndrome [Hiemstra H S. et al., Proc Natl Acad Sci units S A 2001 Mar. 27; 98 (7):3988], non-paraneoplastic stiff man syndrome, progressive cerebellar atrophies, encephalitis, Rasmussen's encephalitis amyotropic lateral sclerosis, Sydeham chorea, Gilles de la Tourette syndrome and autoimmune polyendocrinopathies [Antoine J C. and Honnorat J. Rev Neurol (Paris) 2000 January; 156 (1):23], dysimmune neuropathies [Nobile-Orazio E. et al., Electroencephalogr Clin Neurophysiol Suppl 1999; 50:419], acquired neuromyotonia, arthrogyposis multiplex congenita [Vincent A. et al., Ann NY Acad Sci. 1998 May 13; 841:482], neuritis, optic neuritis [Soderstrom M. et al., J Neurol Neurosurg Psychiatry 1994 May; 57 (5):544) multiple sclerosis and neurodegenerative diseases.

[1033] Examples of autoimmune muscular diseases include, but are not limited to, myositis, autoimmune myositis and primary Sjogren's syndrome. [Feist E. et al., Int Arch Allergy Immunol 2000 September; 123 (1):92) and smooth muscle autoimmune disease [Zauli D. et al., Biomed Pharmacother 1999 June; 53 (5-6):234].

[1034] Examples of autoimmune nephric diseases include, but are not limited to, nephritis and autoimmune interstitial nephritis [Kelly C J. J Am Soc Nephrol 1990 August; 1 (2):140], glommerular nephritis.

[1035] Examples of autoimmune diseases related to reproduction include, but are not limited to, repeated fetal loss [Tincani A. et al., Lupus 1998; 7 Suppl 2:S107-9].

[1036] Examples of autoimmune connective tissue diseases include, but are not limited to, ear diseases, autoimmune ear diseases [Yoo T J. et al., Cell Immunol 1994 August; 157 (1):249) and autoimmune diseases of the inner ear [Gloddek B. et al., Ann NY Acad Sci 1997 Dec. 29; 830:266].

[1037] Examples of autoimmune systemic diseases include, but are not limited to, systemic lupus erythematosus [Erikson J. et al., Immunol Res 1998; 17 (1-2):49) and systemic sclerosis [Renaudineau Y. et al., Clin Diagn Lab Immunol. 1999 March; 6 (2):156; Chan O T. et al., Immunol Rev 1999 June; 169:107].

[1038] Infectious Diseases

[1039] Examples of infectious diseases include, but are not limited to, chronic infectious diseases, subacute infectious diseases, acute infectious diseases, viral diseases, bacterial diseases, protozoan diseases, parasitic diseases, fungal, diseases, mycoplasma diseases, and prion diseases.

[1040] Graft Rejection Diseases

[1041] Examples of diseases associated with transplantation of a graft include, but are not limited to, graft rejection, chronic graft rejection, subacute graft rejection, hyperacute graft rejection, acute graft rejection, and graft versus host disease.

[1042] Allergic Diseases

[1043] Examples of allergic diseases include, but not limited to, asthma, hives urticaria, pollen allergy, dust mite allergy, venom allergy, cosmetics allergy, latex allergy, chemical allergy, drug allergy, insect bite allergy, animal dander allergy, stinging plant allergy, poison ivy allergy and food allergy.

[1044] Cancerous Diseases

[1045] Examples of cancer include but are not limited to carcinoma, lymphoma, blastoma, sarcoma, and leukemia. Particular examples of cancerous diseases but are not limited to: Myeloid leukemia such as Chronic myelogenous leukemia. Acute myelogenous leukemia with maturation. Acute promyelocytic leukemia, Acute nonlymphocytic leukemia with increased basophils. Acute monocytic leukemia. Acute myelomonocytic leukemia with eosinophilia; malignant lymphoma, such as Birkitt's Non-Hodgkin's; Lymphoctyic leukemia, such as, acute lumphoblastic leukemia. Chronic lymphocytic leukemia; Myeloproliferative diseases, such as Solid tumors Benign Meningioma, Mixed tumors of salivary gland, Colonic adenomas; Adenocarcinomas, such as Small cell lung cancer, Kidney, Uterus, Prostate, Bladder, Ovary, Colon, Sarcomas, Liposarcoma, myxoid, Synovial sarcoma, Rhabdomyosarcoma (alveolar), Extraskeletel myxoid chonodrosarcoma, Ewing's tumor; other include Testicular and ovarian dysgerminoma, Retinoblastoma, Wilms' tumor, Neuroblastoma, Malignant melanoma, Mesothelioma, breast; skin, prostate, and ovarian.

### Example 8

### Data Files Supporting Designation of Alternative Exons

[1046] File DataOnExons.txt—contains the summary of all details according to which the exon was declared as alternative. Each line in this file begins with the name of the exon, and thereafter contains the following fields:

[1047] 1. #MOUSE_EXON—the name of the orthologous matching mouse exon. File mouse_exons.fasta contains the sequences of the mouse exons that correspond to the human exons (matching to, the #MOUSE_EXON field in file DataOnExons.txt file).
[1048] #ST strand of this exon on the DNA
[1049] #EXON_LEN length of exon
[1050] #EXON_DIVIDABLE_BY_{—}3—is the exon divisable by; 3 (1=yes, 0=no)
[1051] #EXON_ALN_LEN—length of human/mouse local exon alignment
[1052] #EXON_ALN_IDN—identity level in human/mouse local exon alignment
[1053] #UPSTREAM_ALN_LEN—length of human/mouse local alignment of upstream intronic sequences
[1054] #UPSTREAM_ALN_IDN—identity level of human/mouse local alignment of upstream intronic sequences
[1055] #DOWNSTREAM_ALN_LEN—length of human/mouse local alignment of downstream intronic sequences
[1056] #DOWNSTREAM_ALN_IDN—identity level of human/mouse local alignment of downstream intronic sequences
[1057] #EXON_GLOBAL_ALN_LEN—length of human/mouse global exon alignment
[1058] #EXON_GLOBAL_ALN_IDN—identity level in human/mouse global exon alignment
[1059] #PERC_CONST—percent of constitutive exons in training set that correspond to these combination of features
[1060] #PERC_ALT—percent of alternative exons in training set that correspond to these combination of features
[1061] #SCORE—alternativeness score, calculated as described in the text

### Example 9

### Description of CD-ROM3

[1062] Enclosed CD-ROM3 contains the following files:

[1063] 1. “CROG_localization_{—}1”, containing protein cellular localization information.

[1064] 2. “crog_proteins_ipr_report_{—}1_dos”, containing information related to Interpro analysis of domains.

[1065] 3. “CROG_expression_x”, wherein “x” may be 1 or 2, containing information related to expression of transcripts according to oligonucleotide data.

[1066] 4. “oligo probs abbreviations for patent”, containing information about abbreviations of tissue names for oligonucleotide probe binding.

[1067] 5. “crog_report_x_{—}1” wherein “x” may be from 1 to 45, containing comparison reports between known protein sequences and variant protein sequences according to the present invention, including identifying unique regions therein.

[1068] 6. “variants_report.txt”, containing the information about the different variants of the known protein sequences (for example, due to known amino acid changes because of an SNP).

[1069] All tables are best viewed by using a text editor with the “word wrap” function disabled (to preserve line integrity) and in a fixed width font, such as Courier for example, preferably in font size 10. Table spacing is described for each table as a guide to assist in reading the tables.

[1070] With regard to protein cellular localization information, table structure is as follows: column 1 features the protein identifier as used throughout the application to identify this sequence column 2 features the name of the protein; column 3 shows localization (which may be intracellular, membranal or secreted); and column 4 gives the reason for this localization in terms of results from particular software programs that were used to determine localization. Spacing for this table is as follows: column 1: characters 1-9; column 2: characters 10-45; column 3: 46-61; and column 4: characters 62-121.

[1071] Information given in the text with regard to cellular localization was determined according to four different software programs: (i) tmhmm (from Center for Biological Sequence Analysis, Technical University of Denmark DTU, http://www.cbs.dtu.dk/services/TMHMM/TMHMM2.0b.guide.php) or (ii) tmpred (from EMBnet, maintained by the ISREC Bionformatics group and the LICR Information Technology Office, Ludwig Institute for Cancer Research, Swiss Institute of Bioinformatics, http://www.ch.embnet.org/software/TMPRED_form.html) for transmembrane region prediction; (iii) signalp_hmm or (iv) signalp_nn (both from Center for Biological Sequence Analysis, Technical University of Denmark DTU, http://www.cbs.dtu.dk/services/SignaIP/background/prediction.php) for signal peptide prediction. The terms “signalp_hmm” and “signalp_nn” refer to two modes of operations for the program SignaIP:hmm refers to Hidden Markov Model, while nn refers to neural networks. Localization was also determined through manual inspection of known protein localization and/or gene structure, and the use of heuristics by the individual inventor. In some cases for the manual inspection of cellular localization prediction inventors used the ProLoc computational platform [Einat Hazkani-Covo, Erez Levanon, Galit Rotman, Dan Graur and Amit Novik; (2004) “Evolution of multicellularity in metazoa: comparative analysis of the subcellular localization of proteins in Saccharomyces, Drosophila and Caenorhabditis.” Cell Biology International 2004; 28(3):171-8.], which predicts protein localization based on various parameters including, protein domains (e.g., prediction of trans-membranous regions and localization thereof within the protein), pI, protein length, amino acid composition, homology to pre-annotated proteins, recognition of sequence patterns which direct the protein to a certain organelle (such as, nuclear localization signal, NLS, mitochondria localization signal), signal peptide and anchor modeling and using unique domains from Pfam that are specific to a single compartment.

[1072] With regard to Interpro analysis of domains, table structure is as follows: column 1 features the protein identifier as used throughout the application to identify this sequence; column 2 features the name of the protein; column 3 features the Intepro identifier; column 4 features the analysis type; column 5 features the domain description; and column 6 features the position(s) of the amino acid residues that are relevant to this domain on the protein (amino acid sequence). Spacing for this table is as follows: column 1: characters 1-8; column 2: characters 9-48; column 3: 49-72; column 4: characters 13-96; column 5: characters 97-136; and column 6: 137-168.

[1073] Interpro provides information with regard to the analysis of amino acid sequences to identify, domains having certain functionality (see Mulder et al (2003), The InterPro Database, 2003 brings increased-coverage and new features, Nucleic Acids Res. 31, 315-318 for a reference). It features a database of protein families, domains and functional sites in which identifiable features found in known proteins can be applied to unknown protein sequences. The analysis type relates to the type of software used to determine the domain: Pfam (see Bateman A, et al (2004) The Pfam protein families database. Nucleic Acids Res. 32, 138-41), SMART (see Letunic I, et al (2004) SMART 40: towards genomic data integration. Nucleic Acids Res. 32, 142-4), TIGRFAMs (see Haft D H, et al (2003) The TIGRFAMs database of protein families. Nucleic Acids Res. 31, 371-373), PIRSF (see Wu C H et al (2003) The Protein Information Resource. Nucleic Acids Res. 31, 345-347), and SUPERFAMILY (see Gough J et al (2001) Assignment of homology to genome sequences using a library of Hidden Markov. Models that represent all proteins of known structure. Journal Molecular Biol. 313, 903-919) all use hidden Markov models (HMMs) to determine the location of domains on protein sequences.

[1074] With regard to transcript expression information, table structure is as follows: column 1 features the transcript identifier as used throughout the application to identify this sequence; column 2 features the name of the transcript; column 3 features the name of the probeset used in the chip experiment; and column 4 relates to the tissue and level of expression found. Spacing for this table is as follows: column 1: characters 1-9; column 2: characters 10-27; column 3: 28-41; and column 4: characters 42-121. Information given in the text with regard to expression was determined according to oligonucleotide binding to arrays. Information is given with regard to overexpression of a cluster in cancer based on microarrays. As a microarray reference, in the specific segment paragraphs, the unabbreviated tissue name was used as the reference to the type of chip for which expression was measured. Oligonucleotide microarray results were taken from Affymetrix data, available from Affymetrix Inc, Santa Clara, Calif., USA (see for example data regarding the Human Genome U133 (HG-U133) Set at www.affymetrix.com/products/arrays/specific/hgu133.affx; GeneChip Human Genome U133A 2.0 Array at www.affymetrix.com/products/arrays/specific/hgu133av2.affx; and Human Genome U133 Plus 2.0 Array at www.affymetrix.com/products/arrays/specific/hgu133plus.affx). The data is available from NCBI Gene Expression Omnibus (see www.ncbi.nlm.nih.gov/projects/geo/ and Edgar et al, Nucleic Acids Research, 2002, Vol. 30, No. 1 207-210). The dataset (including results) is available from www.ncbi.nlm.nih.gov/geo/query/acc.cgi?acc=GSE1133 for the Series GSE1133 database (published on March 2004); a reference to these results is as follows: Su et al (Proc Natl Acad Sci USA. 2004 Apr. 20, 101(16):6062-7. Epub 2004 Apr. 09).

[1075] With regard to comparison reports between variant protein according to the present invention and known protein, table structure is as follows: column 1 features the protein identifier as used throughout the application to identify this sequence, column 2 features the name of the protein; column 3 reports on the differences between the variant protein sequence and the known protein sequence (including the name of the known protein); and column 4 shows the alignment between the variant protein sequence and the known protein sequence. Spacing for this table is as follows: characters 1-18: column 1; characters 19-32: column 2; characters 33-92: column 3; and characters 97-170: column 4.

[1076] Information given in the text with regard to the Homology to the known proteins was determined by Smith-Waterman version 5.1.2 using special (non default) parameters as follows:
[1077] model=sw.model
[1078] GAPEXT=0
[1079] GAPOP=100.0
[1080] MATRIX=blosum100

[1081] In some cases, the known protein sequence was included with one or more known variations in order to assist in the above comparison. These sequences are given in variants_report.txt: column 1 features the name of the protein sequence as it appears in the comparison to the variant protein(s); column 2 features the altered protein sequence; column 3 features the type of variation (for example init_met refers to lack of methioinine at the beginning of the original sequence); column 4 states the location of the variation in terms of the amino acid(s) that is/are changed, column 5 shows FROM; and column 6 shows TO (FROM and TO—start and end of the described feature on the protein sequence). Spacing for this table is as follows: column 1: characters 1-24; column 2: characters 25-96; column 3: characters 97-120; column 4: characters 121-144, and column 5: characters: 145-169.

[1082] The comparison reports herein may optionally include such features as bridges, tails, heads and/or insertions (unique regions), and/or analogs, homologs and derivatives of such peptides (unique regions).

[1083] As used herein a “tail” refers to a peptide sequence at the end of an amino acid sequence that is unique to a splice variant according to the present invention. Therefore, a splice variant having such a tail may optionally be considered as a chimera, in that at least a first portion of the splice variant is typically highly homologous (often 100% identical) to a portion of the corresponding known protein, while at least a second portion of the variant comprises the tail.

[1084] As used herein a “head” refers to a peptide sequence at the beginning of an amino acid sequence that is unique to a splice variant according to the present invention. Therefore, a splice variant having such a head may optionally be considered as a chimera, in that at least a first portion of the splice variant comprises the head, while at least a second portion is typically highly homologous (often 100% identical) to a portion of the corresponding known protein.

[1085] As used herein “an edge portion” refers to a connection between two portions of a splice variant according to the present invention that were not joined in the wild type or known protein. An edge may optionally arise due to a join between the above “known protein” portion of a variant and the tail, for example, and/or may occur if an internal portion of the wild type sequence is no longer present, such that two portions of the sequence are now contiguous in the splice variant that were not contiguous in the known protein. A “bridge” may optionally be an edge portion as described above, but may also include a join between a head and a “known protein” portion of a variant, or a join between a tail and a known protein” portion of a variant, or a join between an insertion and a “known protein” portion of a variant.

[1086] Optionally and preferably, a bridge between a tail or a head or a unique insertion, and a “known protein” portion of a variant, comprises at least about 10 amino acids, more preferably at least about 20 amino acids, most preferably at least about 30 amino acids, and even more preferably at least about 40 amino acids, in which at least one amino acid is from the tail/head/insertion and at least one amino acid is from the “known protein” portion of a variant. Also optionally, the bridge may comprise any number of amino acids from about 10 to about 40 amino acids (for example, 10, 11, 12, 13 . . . 37, 38, 39, 40 amino acids in length, or any number in between).

[1087] It should be noted that bridge cannot be extended beyond the length of the sequence in either direction, and it should be assumed that every bridge description is to be read in such manner that the bridge length does not extend beyond the sequence itself.

[1088] Furthermore, bridges are described with regard to a sliding window in certain contexts below. For example, certain descriptions of the bridges feature the following format: a bridge between two edges (in which a portion of the known protein is not present in the variant) may optionally be described as follows: a bridge portion of CONTIG-NAME_P1 (representing the name of the protein), comprising a polypeptide having a length “n”, wherein n is at least about 10 amino acids in length, optionally at least about 20 amino acids in length, preferably at least about 30 amino acids in length, more preferably at least about 40 amino acids in length and most preferably at least about 50 amino acids in length, wherein at least two amino acids comprise XX (2 amino acids in the center of the bridge, one from each end of the edge), having a structure a follows (numbering according to the sequence of, CONTIG-NAME_P1): a sequence starting from any of amino acid numbers 49-x to 49 (for example); and ending at any of amino acid numbers 50+((n−2)−x) (for example), in which x varies from 0 to n−2. In this example, it should also be read as including bridges in which n is any number of amino acids between 10-50 amino acids in length. Furthermore, the bridge polypeptide cannot extend beyond the sequencer so it should be read such that 49-x (for example) is not less than 1 nor 50+((n−1)−x) (for example) greater than the total sequence length.

[1089] In another embodiment, this invention provides antibodies specifically recognizing the splice variants and polypeptide fragments thereof of this invention. Preferably such antibodies differentially recognize splice variants of the present invention but do not recognize a corresponding known protein, optionally and more preferably through recognition of a unique region as described herein.

[1090] All nucleic acid sequences and/or amino acid sequences shown herein as embodiments of the present invention relate to their isolated form, as isolated polynucleotides (including for all transcripts), oligonucleotides (including for all segments, amplicons and primers), peptides (including for all tails, bridges, insertions or heads, optionally including other antibody epitopes as describe herein) and/or polypeptides (including for all proteins). It should be noted that oligonucleotide and polynucleotide, or peptide and polypeptide, may optionally be used interchangeably.

[1091] It is appreciated that certain features of the invention, which are, for clarity, described in the context of separate embodiments, may also be provided in combination in a single embodiment. Conversely, various features of the invention, which are, for brevity, described in the context of a single embodiment, may also be provided separately or in any suitable subcombination.

[1092] Although the invention has been described in conjunction with specific embodiments thereof, it is evident that many alternatives, modifications and variations will be apparent to those skilled in the art. Accordingly, it is intended to embrace all such alternatives, modifications and variations that fall within the spirit and broad scope of the appended claims. All publications, patents and patent applications mentioned in this specification are herein incorporated in their entirety by reference into the specification to the same extent as if each individual publication, patent or patent application was specifically and individually indicated to be incorporated herein by reference. In addition, citation or identification of any reference in this application shall not be construed as an admission that such reference is available as prior art to the present invention.

The application's sequence listing, which the Patent Office published only in electronic form, follows.

SEQUENCE LISTING (469 sequences)

SEQ ID NO: 1 - DNA, 22 bp, Artificial sequence
  Single strand DNA oligonucleotide
accggcctcactctccaaatgg

SEQ ID NO: 2 - DNA, 23 bp, Artificial sequence
  Single strand DNA oligonucleotide
tggctcggctgactcatgtacgg

SEQ ID NO: 3 - DNA, 25 bp, Artificial sequence
  Single strand DNA oligonucleotide
aagctccagcattacagcacaggcc

SEQ ID NO: 4 - DNA, 24 bp, Artificial sequence
  Single strand DNA oligonucleotide
accctccaggcgaatgatgttagg

SEQ ID NO: 5 - DNA, 19 bp, Artificial sequence
  Single strand DNA oligonucleotide
ccaaggtgcgactgtgcgg

SEQ ID NO: 6 - DNA, 26 bp, Artificial sequence
  Single strand DNA oligonucleotide
ggtagagagcagaggcgtacaggacg

SEQ ID NO: 7 - DNA, 29 bp, Artificial sequence
  Single strand DNA oligonucleotide
tgagcccctgaaagagtgtcatataaacg

SEQ ID NO: 8 - DNA, 29 bp, Artificial sequence
  Single strand DNA oligonucleotide
tctaagccaatcttcctgatgtctcttcg

SEQ ID NO: 9 - DNA, 25 bp, Artificial sequence
  Single strand DNA oligonucleotide
cctgctctacatcaaccctgaggcc

SEQ ID NO: 10 - DNA, 25 bp, Artificial sequence
  Single strand DNA oligonucleotide
ccatagctaggcagggaatggatcc

SEQ ID NO: 11 - DNA, 20 bp, Artificial sequence
  Single strand DNA oligonucleotide
gaacacggatggcgccttcc

SEQ ID NO: 12 - DNA, 24 bp, Artificial sequence
  Single strand DNA oligonucleotide
ggggcaaagtgtatcgatcacccg

SEQ ID NO: 13 - DNA, 26 bp, Artificial sequence
  Single strand DNA oligonucleotide
ggtcgggaacatctctcggtctatgc

SEQ ID NO: 14 - DNA, 29 bp, Artificial sequence
  Single strand DNA oligonucleotide
gctcccttttcagaacaatgttatgtcgc

SEQ ID NO: 15 - DNA, 24 bp, Artificial sequence
  Single strand DNA oligonucleotide
aaaagatgctgatgggatcctggc

SEQ ID NO: 16 - DNA, 24 bp, Artificial sequence
  Single strand DNA oligonucleotide
tgcagtctggaagcatttcctgcc

SEQ ID NO: 17 - DNA, 25 bp, Artificial sequence
  Single strand DNA oligonucleotide
cagcacgagctacctcagcaagacg

SEQ ID NO: 18 - DNA, 27 bp, Artificial sequence
  Single strand DNA oligonucleotide
cactgacaggtctcttcatccagctcc

SEQ ID NO: 19 - DNA, 27 bp, Artificial sequence
  Single strand DNA oligonucleotide
tcacctcgtggaccagaattttaaccc

SEQ ID NO: 20 - DNA, 24 bp, Artificial sequence
  Single strand DNA oligonucleotide
actaagggctggccattcagttgc

SEQ ID NO: 21 - DNA, 23 bp, Artificial sequence
  Single strand DNA oligonucleotide
ggatcatcagacaccacaccggc

SEQ ID NO: 22 - DNA, 26 bp, Artificial sequence
  Single strand DNA oligonucleotide
cgtgaggatactgagaatcccaacgc

SEQ ID NO: 23 - protein, 833 aa, Artificial sequence
  A novel predicted alternative spliced variant protein product
MGTSALWALWLLLALCWAPRESGATGTGRKAKCEPSQFQCTNGRCITLLWKCDGDEDCVDGSDEKNCVKKTCAESDFVCNNGQCVPSRWKCDGDPDCEDGSDESPEQCHMRTCRIHEISCGAHSTQCIPVSWRCDGENDCDSGEDEENCGNITCSPDEFTCSSGRCISRNFVCNGQDDCSDGSDELDCAPPTCGAHEFQCSTSSCIPISWVCDDDADCSDQSDESLEQCGRQPVIHTKCPASEIQCGSGECIHKKWRCDGDPDCKDGSDEVNCPSRTCRPDQFECEDGSCIHGSRQCNGIRDCVDGSDEVNCKNVNQCLGPGKFKCRSGECIDISKVCNQEQDCRDWSDEPLKECHIDECQNPGICSQICINLKGGYKCECSRGYQMDLATGVCKAVGKEPSLIFTNRRDIRKIGLERKEYIQLVEQLRNTVALDADIAAQKLFWADLSQKAIFSASIDDKVGRHVKMIDNVYNPAAIAVDWVYKTIYWTDAASKTISVATLDGTKRKFLFNSDLREPASIAVDPLSGFVYWSDWGEPAKIEKAGMNGFDRRPLVTADIQWPNGITLDLIKSRLYWLDSKLHMLSSVDLNGQDRRIVLKSLEFLAHPLALTIFEDRVYWIDGENEAVYGANKFTGSELATLVNNLNDAQDIIVYHELVQPSGKNWCEEDMENGGCEYLCLPAPQINDHSPKYTCSCPSGYNVEENGRDCQSTATTVTYSETKDTNTTEISATSGLVPGGINVTTAVSEVSVPPKGTSAAWAILPLLLLVMAAVGGYLMWRNWQHKNMKSMNFDNPVYLKTTEEDLSIDIGRHSASVGHTYPAISVVSTDDDLA

SEQ ID NO: 24 - protein, 831 aa, Artificial sequence
  A novel predicted alternative spliced variant protein product
MGTSALWALWLLLALCWAPRESGATGTGRKAKCEPSQFQCTNGRCITLLWKCDGDEDCVDGSDEKNCVKKTCAESDFVCNNGQCVPSRWKCDGDPDCEDGSDESPEQCHMRTCRIHEISCGAHSTQCIPVSWRCDGENDCDSGEDEENCGNITCSPDEFTCSSGRCISRNFVCNGQDDCSDGSDELDCAPPTCGAHEFQCSTSSCIPISWVCDDDADCSDQSDESLEQCGRQPVIHTKCPASEIQCGSGECIHKKWRCDGDPDCKDGSDEVNCPSRTCRPDQFECEDGSCIHGSRQCNGIRDCVDGSDEVNCKNVNQCLGPGKFKCRSGECIDISKVCNQEQDCRDWSDEPLKECHINECLVNNGGCSHICKDLVIGYECDCAAGFELIDRKTCGGKEPSLIFTNRRDIRKIGLERKEYIQLVEQLRNTVALDADIAAQKLFWADLSQKAIFSASIDDKVGRHVKMIDNVYNPAAIAVDWVYKTIYWTDAASKTISVATLDGTKRKFLFNSDLREPASIAVDPLSGFVYWSDWGEPAKIEKAGMNGFDRRPLVTADIQWPNGITLDLIKSRLYWLDSKLHMLSSVDLNGQDRRIVLKSLEFLAHPLALTIFEDRVYWIDGENEAVYGANKFTGSELATLVNNLNDAQDIIVYHELVQPSGKNWCEEDMENGGCEYLCLPAPQINDHSPKYTCSCPSGYNVEENGRDCQSTATTVTYSETKDTNTTEISATSGLVPGGINVTTAVSEVSVPPKGTSAAWAILPLLLLVMAAVGGYLMWRNWQHKNMKSMNFDNPVYLKTTEEDLSIDIGRHSASVGHTYPAISVVSTDDDLA

SEQ ID NO: 25 - protein, 577 aa, Artificial sequence
  A novel predicted alternative spliced variant protein product
MGTSALWALWLLLALCWAPRESGATGTGRKAKCEPSQFQCTNGRCITLLWKCDGDEDCVDGSDEKNCVKKTCAESDFVCNNGQCVPSRWKCDGDPDCEDGSDESPEQCHMRTCRIHEISCGAHSTQCIPVSWRCDGENDCDSGEDEENCGNITCSPDEFTCSSGRCISRNFVCNGQDDCSDGSDELDCAPPTCGAHEFQCSTSSCIPISWVCDDDADCSDQSDESLEQCGRQPVIHTKCPASEIQCGSGECIHKKWRCDGDPDCKDGSDEVNCPSRTCRPDQFECEDGSCIHGSRQCNGIRDCVDGSDEVNCKNVNQCLGPGKFKCRSGECIDISKVCNQEQDCRDWSDEPLKECHINECLVNNGGCSHICKDLVIGYECDCAAGFELIDRKTCGDIDECQNPGICSQICINLKGGYKCECSRGYQMDLATGVCKAVGKEPSLIFTNRRDIRKIGLERKEYIQLVEQLRNTVALDADIAAQKLFWADLSQKAIFSASIDDKVGRHVKMIDNVYNPAAIAVDWVYKTIYWTDAASKTISVATLDGTKRKFLFNSDLREPASIAVDPLSGPYKKSPLLA

SEQ ID NO: 26 - protein, 694 aa, Artificial sequence
  A novel predicted alternative spliced variant protein product
MGTSALWALWLLLALCWAPRESGATGTGRKAKCEPSQFQCTNGRCITLLWKCDGDEDCVDGSDEKNCVKKTCAESDFVCNNGQCVPSRWKCDGDPDCEDGSDESPEQCHMRTCRIHEISCGAHSTQCIPVSWRCDGENDCDSGEDEENCGNITCSPDEFTCSSGRCISRNFVCNGQDDCSDGSDELDCAPPTCGAHEFQCSTSSCIPISWVCDDDADCSDQSDESLEQCGRQPVIHTKCPASEIQCGSGECIHKKWRCDGDPDCKDGSDEVNCPSRTCRPDQFECEDGSCIHGSRQCNGIRDCVDGSDEVNCKNVNQCLGPGKFKCRSGECIDISKVCNQEQDCRDWSDEPLKECHINECLVNNGGCSHICKDLVIGYECDCAAGFELIDRKTCGDIDECQNPGICSQICINLKGGYKCECSRGYQMDLATGVCKAVGKEPSLIFTNRRDIRKIGLERKEYIQLVEQLRNTVALDADIAAQKLFWADLSQKAIFSASIDDKVGRHVKMIDNVYNPAAIAVDWVYKTIYWTDAASKTISVATLDGTKRKFLFNSDLREPASIAVDPLSGFVYWSDWGEPAKIEKAGMNGFDRRPLVTADIQWPNGITLDLIKSRLYWLDSKLHMLSSVDLNGQDRRIVLKSLEFLAHPLALTIFEVKIGVKKTWRMEDVNTYACQHHRLMITLQNIPVPVPVGTM

SEQ ID NO: 27 - protein, 824 aa, Artificial sequence
  A novel predicted alternative spliced variant protein product
MGTSALWALWLLLALCWAPRESGATGTGRKAKCEPSQFQCTNGRCITLLWKCDGDEDCVDGSDEKNCVKKTCAESDFVCNNGQCVPSRWKCDGDPDCEDGSDESPEQCHMRTCRIHEISCGAHSTQCIPVSWRCDGENDCDSGEDEENCGNITCSPDEFTCSSGRCISRNFVCNGQDDCSDGSDELDCAPPTCGAHEFQCSTSSCIPISWVCDDDADCSDQSDESLEQCGRQPVIHTKCPASEIQCGSGECIHKKWRCDGDPDCKDGSDEVNCPSRTCRPDQFECEDGSCIHGSRQCNGIRDCVDGSDEVNCKNVNQCLGPGKFKCRSGECIDISKVCNQEQDCRDWSDEPLKECHINECLVNNGGCSHICKDLVIGYECDCAAGFELIDRKTCGDIDECQNPGICSQICINLKGGYKCECSRGYQMDLATGVCKAVGKEPSLIFTNRRDIRKIGLERKEYIQLVEQLRNTVALDADIAAQKLFWADLSQKAIFSASIDDKVGRHVKMIDNVYNPAAIAVDWVYKTIYWTDAASKTISVATLDGTKRKFLFNSDLREPASIAVDPLSGFVYWSDWGEPAKIEKAGMNGFDRRPLVTADIQWPNGITLDLIKSRLYWLDSKLHMLSSVDLNGQDRRIVLKSLEFLAHPLALTIFEDRVYWIDGENEAVYGANKFTGSELATLVNNLNDAQDIIVYHELVQPSGTATTVTYSETKDTNTTEISATSGLVPGGINVTTAVSEVSVPPKGTSAAWAILPLLLLVMAAVGGYLMWRNWQHKNMKSMNFDNPVYLKTTEEDLSIDIGRHSASVGHTYPAISVVSTDDDLA

SEQ ID NO: 28 - protein, 431 aa, Artificial sequence
  A novel predicted alternative spliced variant protein product
MGTSALWALWLLLALCWAPRESGATGTGRKAKCEPSQFQCTNGRCITLLWKCDGDEDCVDGSDEKNCVKKTCAESDFVCNNGQCVPSRWKCDGDPDCEDGSDESPEQCHMRTCRIHEISCGAHSTQCIPVSWRCDGENDCDSGEDEENCGNITCSPDEFTCSSGRCISRNFVCNGQDDCSDGSDELDCAPPTCGAHEFQCSTSSCIPISWVCDDDADCSDQSDESLEQCGRQPVIHTKCPASEIQCGSGECIHKKWRCDGDPDCKDGSDEVNCPSRTCRPDQFECEDGSCIHGSRQCNGIRDCVDGSDEVNCKNVNQCLGPGKFKCRSGECIDISKVCNQEQDCRDWSDEPLKECHINECLVNNGGCSHICKDLVIGYECDCAAGFELIDRKTCGGESKKKTWTLQVMGKDSMYLVRYRSSKTNSDFPPRY

SEQ ID NO: 29 - protein, 199 aa, Artificial sequence
  A novel predicted alternative spliced variant protein product
MHLLGFFSVACSLLAAALLPGPREAPAAAAAFESGLDLSDAEPDAGEATAYASKDLEEQLRSVSSVDELMTVLYPEYWKMYKCQLRKGGWQHNREQANLNSRTEETIKFAAAHYNTEILKSIDNEWRKTQCMPREVCIDVGKEFGVATNTFFKPPCVSVYRCGGCCNSEGLQCMNTSTSYLSKTVSGSEQDLPHQLHVE

SEQ ID NO: 30 - protein, 1300 aa, Artificial sequence
  A novel predicted alternative spliced variant protein product
MVSYWDTGVLLCALLSCLLLTGSSSGSKLKDPELSLKGTQHIMQAGQTLHLQCRGEAAHKWSLPEMVSKESERLSITKSACGRNGKQFCSTLTLNTAQANHTGFYSCKYLAVPTSKKKETESAIYIFISDTGRPFVEMYSEIPEIIHMTEGRELVIPCRVTSPNITVTLKKFPLDTLIPDGKRIIWDSRKGFIISNATYKEIGLLTCEATVNGHLYKTNYLTHRQTNTIIDVQISTPRPVKLLRGHTLVLNCTATTPLNTRVQMTWSYPDEKNKRASVRRRIDQSNSHANIFYSVLTIDKMQNKDKGLYTCRVRSGPSFKSVNTSVHIYDKAFITVKHRKQQVLETVAGKRSYRLSMKVKAFPSPEVVWLKDGLPATEKSARYLTRGYSLIIKDVTEEDAGNYTILLSIKQSNVFKNLTATLIVNVKPQIYEKAVSSFPDPALYPLGSRQILTCTAYGIPQPTIKWFWHPCNHNHSEARCDFCSNNEESFILDADSNMGNRIESITQRMAIIEGKNKMASTLVVADSRISGIYICIASNKVGTVGRNISFYITDVPNGFHVNLEKMPTEGEDLKLSCTVNKFLYRDVTWILLRTVNNRTMHYSISKQKMAITKEHSITLNLTIMNVSLQDSGTYACRARNVYTGEEILQKKEITIRDQEAPYLLRNLSDHTVAISSSTTLDCHANGVPEPQITWFKNNHKIQQEPGIILGPGSSTLFIERVTEEDEGVYHCKATNQKGSVESSAYLTVQGTSDKSNLELITLTCTCVAATLFWLLLTLLIRKMKRSSSEIKTDYLSIIMDPDEVPLDEQCERLPYDASKWEFARERLKLGKSLGRGAFGKVVQASAFGIKKSPTCRTVAVKMLKGPLMVIVEYCKYGNLSNYLKSKRDLFFLNKDAALHMEPKKEKMEPGLEQGKKPRLDSVTSSESFASSGFQEDKSLSDVEEEEDSDGFYKEPITMEDLISYSFQVARGMEFLSSRKCIHRDLAARNILLSENNVVKICDFGLARDIYKNPDYVRKGDTRLPLKWMAPESIFDKIYSTKSDVWSYGVLLWEIFSLGGSPYPGVQMDEDFCSRLREGMRMRAPEYSTPEIYQIMLDCWHRDPKERPRFAELVEKLGDLLQANVQQDGKDYIPINAILTGNSGFTYSTPAFSEDFFKESISAPKFNSGSSDDVRYVNAFKFMSLERIKTFEELLPNATSMFDDYQGDSSTLLASPMLKRFTWTDSKPKASLKIDLRVTSKSKESGLSDVSRPSFCHSSCGHVSEGKRRFTYDHAELERKIACCSPPPDYNSVVLYSTPPI

SEQ ID NO: 31 - protein, 773 aa, Artificial sequence
  A novel predicted alternative spliced variant protein product
MQSKVLLAVALWLCVETRAASVGLPSVSLDLPRLSIQKDILTIKANTTLQITCRGQRDLDWLWPNNQSGSEQRVEVTECSDGLFCKTLTIPKVIGNDTGAYKCFYRETDLASVIYVYVQDYRSPFIASVSDQHGVVYITENKNKTVVIPCLGSISNLNVSLCARYPEKRFVPDGNRISWDSKKGFTIPSYMISYAGMVFCEAKINDESYQSIMYIVVVVGYRIYDVVLSPSHGIELSVGEKLVLNCTARTELNVGIDFNWEYPSSKHQHKKLVNRDLKTQSGSEMKKFLSTLTIDGVTRSDQGLYTCAASSGLMTKKNSTFVRVHEKPFVAFGSGMESLVEATVGERVRIPAKYLGYPPPEIKWYKNGIPLESNHTIKAGHVLTIMEVSERDTGNYTVILTNPISKEKQSHVVSLVVYVPPQIGEKSLISPVDSYQYGTTQTLTCTVYAIPPPHHIHWYWQLEEECANEPSQAVSVTNPYPCEEWRSVEDFQGGNKIEVNKNQFALIEGKNKTVSTLVIQAANVSALYKCEAVNKVGRGERVISFHVTRGPEITLQPDMQPTEQESVSLWCTADRSTFENLTWYKLGPQPLPIHVGELPTPVCKNLDTLWKLNATMFSNSTNDILIMELKNASLQDQGDYVCLAQDRKTKKRHCVVRQLTVLERVAPTITGNLENQTTSIGESIEVSCTASGNPPPQIMWFKDNETLVEDSGIVLKDGNRNLTIRRVRKEDEGLYTCQACSVLGCAKVEAFFIIEGQWRGTEDRLLVHRHGSR

SEQ ID NO: 32 - protein, 802 aa, Artificial sequence
  A novel predicted alternative spliced variant protein product
MQSKVLLAVALWLCVETRAASVGLPSVSLDLPRLSIQKDILTIKANTTLQITCRGQRDLDWLWPNNQSGSEQRVEVTECSDGLFCKTLTIPKVIGNDTGAYKCFYRETDLASVIYVYVQDYRSPFIASVSDQHGVVYITENKNKTVVIPCLGSISNLNVSLCARYPEKRFVPDGNRISWDSKKGFTIPSYMISYAGMVFCEAKINDESYQSIMYIVVVVGYRIYDVVLSPSHGIELSVGEKLVLNCTARTELNVGIDFNWEYPSSKHQHKKLVNRDLKTQSGSEMKKFLSTLTIDGVTRSDQGLYTCAASSGLMTKKNSTFVRVHEKPFVAFGSGMESLVEATVGERVRIPAKYLGYPPPEIKWYKNGIPLESNHTIKAGHVLTIMEVSERDTGNYTVILTNPISKEKQSHVVSLVVYVPPQIGEKSLISPVDSYQYGTTQTLTCTVYAIPPPHHIHWYWQLEEECANEPSQAVSVTNPYPCEEWRSVEDFQGGNKIEVNKNQFALIEGKNKTVSTLVIQAANVSALYKCEAVNKVGRGERVISFHVTRGPEITLQPDMQPTEQESVSLWCTADRSTFENLTWYKLGPQPLPIHVGELPTPVCKNLDTLWKLNATMFSNSTNDILIMELKNASLQDQGDYVCLAQDRKTKKRHCVVRQLTVLERVAPTITGNLENQTTSIGESIEVSCTASGNPPPQIMWFKDNETLVEDSGIVLKDGNRNLTIRRVRKEDEGLYTCQACSVLGCAKVEAFFIIEGAQEKTNLEIIILVGTAVIAMFFWLLLVIILRTVKRVSLLAVVPLAK

SEQ ID NO: 33 - protein, 1176 aa, Artificial sequence
  A novel predicted alternative spliced variant protein product
MQSKVLLAVALWLCVETRAASVGLPSVSLDLPRLSIQKDILTIKANTTLQITCRGQRDLDWLWPNNQSGSEQRVEVTECSDGLFCKTLTIPKVIGNDTGAYKCFYRETDLASVIYVYVQDYRSPFIASVSDQHGVVYITENKNKTVVIPCLGSISNLNVSLCARYPEKRFVPDGNRISWDSKKGFTIPSYMISYAGMVFCEAKINDESYQSIMYIVVVVGYRIYDVVLSPSHGIELSVGEKLVLNCTARTELNVGIDFNWEYPSSKHQHKKLVNRDLKTQSGSEMKKFLSTLTIDGVTRSDQGLYTCAASSGLMTKKNSTFVRVHEKPFVAFGSGMESLVEATVGERVRIPAKYLGYPPPEIKWYKNGIPLESNHTIKAGHVLTIMEVSERDTGNYTVILTNPISKEKQSHVVSLVVYVPPQIGEKSLISPVDSYQYGTTQTLTCTVYAIPPPHHIHWYWQLEEECANEPSQAVSVTNPYPCEEWRSVEDFQGGNKIEVNKNQFALIEGKNKTVSTLVIQAANVSALYKCEAVNKVGRGERVISFHVTRGPEITLQPDMQPTEQESVSLWCTADRSTFENLTWYKLGPQPLPIHVGELPTPVCKNLDTLWKLNATMFSNSTNDILIMELKNASLQDQGDYVCLAQDRKTKKRHCVVRQLTVLERVAPTITGNLENQTTSIGESIEVSCTASGNPPPQIMWFKDNETLVEDSGIVLKDGNRNLTIRRVRKEDEGLYTCQACSVLGCAKVEAFFIIEGAQEKTNLEIIILVGTAVIAMFFWLLLVIILRTVKRANGGELKTGYLSIVMDPDELPLDEHCERLPYDASKWEFPRDRLKLGKPLGRGAFGQVIEADAFGIDKTATCRTVAVKMLKEGATHSEHRALMSELKILIHIGHHLNVVNLLGACTKPGGPLMVIVEFCKFGNLSTYLRSKRNEFVPYKTKGARFRQGKDYVGAIPVDLKRRLDSITSSQSSASSGFVEEKSLSDVEEEEAPEDLYKDFLTLEHLICYSFQVAKGMEFLASRKCIHRDLAARNILLSEKNVVKICDFGLARDIYKDPDYVRKGDARLPLKWMAPETIFDRVYTIQSDVWSFGVLLWEIFSLGASPYPGVKIDEEFCRRLKEGTRMRAPDYTTPEMYQTMLDCWHGEPSQRPTFSELVEHLGNLLQANAQQSVSAEQ

SEQ ID NO: 34 - protein, 1235 aa, Artificial sequence
  A novel predicted alternative spliced variant protein product
MQSKVLLAVALWLCVETRAASVGLPSVSLDLPRLSIQKDILTIKANTTLQITCRGQRDLDWLWPNNQSGSEQRVEVTECSDGLFCKTLTIPKVIGNDTGAYKCFYRETDLASVIYVYVQDYRSPFIASVSDQHGVVYITENKNKTVVIPCLGSISNLNVSLCARYPEKRFVPDGNRISWDSKKGFTIPSYMISYAGMVFCEAKINDESYQSIMYIVVVVGYRIYDVVLSPSHGIELSVGEKLVLNCTARTELNVGIDFNWEYPSSKHQHKKLVNRDLKTQSGSEMKKFLSTLTIDGVTRSDQGLYTCAASSGLMTKKNSTFVRVHEKPFVAFGSGMESLVEATVGERVRIPAKYLGYPPPEIKWYKNGIPLESNHTIKAGHVLTIMEVSERDTGNYTVILTNPISKEKQSHVVSLVVYVPPQIGEKSLISPVDSYQYGTTQTLTCTVYAIPPPHHIHWYWQLEEECANEPSQAVSVTNPYPCEEWRSVEDFQGGNKIEVNKNQFALIEGKNKTVSTLVIQAANVSALYKCEAVNKVGRGERVISFHVTRGPEITLQPDMQPTEQESVSLWCTADRSTFENLTWYKLGPQPLPIHVGELPTPVCKNLDTLWKLNATMFSNSTNDILIMELKNASLQDQGDYVCLAQDRKTKKRHCVVRQLTVLERVAPTITGNLENQTTSIGESIEVSCTASGNPPPQIMWFKDNETLVEDSGIVLKDGNRNLTIRRVRKEDEGLYTCQACSVLGCAKVEAFFIIEGAQEKTNLEIIILVGTAVIAMFFWLLLVIILRTVKRANGGELKTGYLSIVMDPDELPLDEHCERLPYDASKWEFPRDRLKLGKPLGRGAFGQVIEADAFGIDKTATCRTVAVKMLKEGATHSEHRALMSELKILIHIGHHLNVVNLLGACTKPGGPLMVIVEFCKFGNLSTYLRSKRNEFVPYKTKGARFRQGKDYVGAIPVDLKRRLDSITSSQSSASSGFVEEKSLSDVEEEEAPEDLYKDFLTLEHLICYSFQVAKGMEFLASRKCIHRDLAARNILLSEKNVVKICDFGLARDIYKDPDYVRKGDARLPLKWMAPETIFDRVYTIQSDVWSFGVLLWEIFSLGASPYPGVKIDEEFCRRLKEGTRMRAPDYTTPEMYQTMLDCWHGEPSQRPTFSELVEHLGNLLQANAQQDGKDYIVLPISETLSMEEDSGLSLPTSPVSCMEEEEVCDPKFHYDNTAGIRTTRRTVVWFLPQKS

SEQ ID NO: 35 - protein, 1267 aa, Artificial sequence
  A novel predicted alternative spliced variant protein product
MQSKVLLAVALWLCVETRAASVGLPSVSLDLPRLSIQKDILTIKANTTLQITCRGQRDLDWLWPNNQSGSEQRVEVTECSDGLFCKTLTIPKVIGNDTGAYKCFYRETDLASVIYVYVQDYRSPFIASVSDQHGVVYITENKNKTVVIPCLGSISNLNVSLCARYPEKRFVPDGNRISWDSKKGFTIPSYMISYAGMVFCEAKINDESYQSIMYIVVVVGYRIYDVVLSPSHGIELSVGEKLVLNCTARTELNVGIDFNWEYPSSKHQHKKLVNRDLKTQSGSEMKKFLSTLTIDGVTRSDQGLYTCAASSGLMTKKNSTFVRVHEKPFVAFGSGMESLVEATVGERVRIPAKYLGYPPPEIKWYKNGIPLESNHTIKAGHVLTIMEVSERDTGNYTVILTNPISKEKQSHVVSLVVYVPPQIGEKSLISPVDSYQYGTTQTLTCTVYAIPPPHHIHWYWQLEEECANEPSQAVSVTNPYPCEEWRSVEDFQGGNKIEVNKNQFALIEGKNKTVSTLVIQAANVSALYKCEAVNKVGRGERVISFHVTRGPEITLQPDMQPTEQESVSLWCTADRSTFENLTWYKLGPQPLPIHVGELPTPVCKNLDTLWKLNATMFSNSTNDILIMELKNASLQDQGDYVCLAQDRKTKKRHCVVRQLTVLERVAPTITGNLENQTTSIGESIEVSCTASGNPPPQIMWFKDNETLVEDSGIVLKDGNRNLTIRRVRKEDEGLYTCQACSVLGCAKVEAFFIIEGAQEKTNLEIIILVGTAVIAMFFWLLLVIILRTVKRANGGELKTGYLSIVMDPDELPLDEHCERLPYDASKWEFPRDRLKLGKPLGRGAFGQVIEADAFGIDKTATCRTVAVKMLKEGATHSEHRALMSELKILIHIGHHLNVVNLLGACTKPGGPLMVIVEFCKFGNLSTYLRSKRNEFVPYKTKGARFRQGKDYVGAIPVDLKRRLDSITSSQSSASSGFVEEKSLSDVEEEEAPEDLYKDFLTLEHLICYSFQVAKGMEFLASRKCIHRDLAARNILLSEKNVVKICDFGLARDIYKDPDYVRKGDARLPLKWMAPETIFDRVYTIQSDVWSFGVLLWEIFSLGASPYPGVKIDEEFCRRLKEGTRMRAPDYTTPEMYQTMLDCWHGEPSQRPTFSELVEHLGNLLQANAQQDGKDYIVLPISETLSMEEDSGLSLPTSPVSCMEEEEVCDPKFHYDNTAGISQYLQNSKRKSRPVSVKTFEDIPLEEPEVKVIPDWNGAQQKQGVCGI

SEQ ID NO: 36 - protein, 317 aa, Artificial sequence
  A novel predicted alternative spliced variant protein product
MAFPPRRRLRLGPRGLPLLLSGLLLPLCRAFNLDVDSPAEYSGPEGSYFGFAVDFFVPSASSRMFLLVGAPKANTTQPGIVEGGQVLKCDWSSTRRCQPIEFDATGNRDYAKDDPLEFKSHQWFGASVRSKQDKILACAPLYHWRTEMKQEREPVGTCFLQDGTKTVEYAPCRSQDIDADGQGFCQGGFSIDFTKADRVLLGGPGSFYWQGQLISDQVAEIVSKYDPNVYSIKYNNQLATRTAQAIFDDSYLGYSVAVGDFNGDGIDDFVSGVPRAARTLGMVYIYDGKNMSSLYNFTGEQLCRCVYWSTSLHGSWL

SEQ ID NO: 37 - protein, 643 aa, Artificial sequence
  A novel predicted alternative spliced variant protein product
MAFPPRRRLRLGPRGLPLLLSGLLLPLCRAFNLDVDSPAEYSGPEGSYFGFAVDFFVPSASSRMFLLVGAPKANTTQPGIVEGGQVLKCDWSSTRRCQPIEFDATGNRDYAKDDPLEFKSHQWFGASVRSKQDKILACAPLYHWRTEMKQEREPVGTCFLQDGTKTVEYAPCRSQDIDADGQGFCQGGFSIDFTKADRVLLGGPGSFYWQGQLISDQVAEIVSKYDPNVYSIKYNNQLATRTAQAIFDDSYLGYSVAVGDFNGDGIDDFVSGVPRAARTLGMVYIYDGKNMSSLYNFTGEQMAAYFGFSVAATDINGDDYADVFIGAPLFMDRGSDGKLQEVGQVSVSLQRASGDFQTTKLNGFEVFARFGSAIAPLGDLDQDGFNDIAIAAPYGGEDKKGIVYIFNGRSTGLNAVPSQILEGQWAARSMPPSFGYSMKGATDIDKNGYPDLIVGAFGVDRAILYRARPVITVNAGLEVYPSILNQDNKTCSLPGTALKVSCFNVRFCLKADGKGVLPRKLNFQVELLLDKLKQKGAIRRALFLYSRSPSHSKNMTISRGGLMQCEELIAYLRDESEFRDKLTPITIFMEYRLDYRTAADTTGLQPILNQFTPANISRQAHILLDCGEDNVCKPKLEVSVDRP

SEQ ID NO: 38 - protein, 1017 aa, Artificial sequence
  A novel predicted alternative spliced variant protein product
MAFPPRRRLRLGPRGLPLLLSGLLLPLCRAFNLDVDSPAEYSGPEGSYFGFAVDFFVPSASSRMFLLVGAPKANTTQPGIVEGGQVLKCDWSSTRRCQPIEFDATGNRDYAKDDPLEFKSHQWFGASVRSKQDKILACAPLYHWRTEMKQEREPVGTCFLQDGTKTVEYAPCRSQDIDADGQGFCQGGFSIDFTKADRVLLGGPGSFYWQGQLISDQVAEIVSKYDPNVYSIKYNNQLATRTAQAIFDDSYLGYSVAVGDFNGDGIDDFVSGVPRAARTLGMVYIYDGKNMSSLYNFTGEQMAAYFGFSVAATDINGDDYADVFIGAPLFMDRGSDGKLQEVGQVSVSLQRASGDFQTTKLNGFEVFARFGSAIAPLGDLDQDGFNDIAIAAPYGGEDKKGIVYIFNGRSTGLNAVPSQILEGQWAARSMPPSFGYSMKGATDIDKNGYPDLIVGAFGVDRAILYRARPVITVNAGLEVYPSILNQDNKTCSLPGTALKVSCFNVRFCLKADGKGVLPRKLNFQVELLLDKLKQKGAIRRALFLYSRSPSHSKNMTISRGGLMQCEELIAYLRDESEFRDKLTPITIFMEYRLDYRTAADTTGLQPILNQFTPANISRQAHILLDCGEDNVCKPKLEVSVDSDQKKIYIGDDNPLTLIVKAQNQGEGAYEAELIVSIPLQADFIGVVRNNELLAGLRFSVHQQSEMDTSVKFDLQIQSSNLFDKVSPVVSHKVDLAVLAAVEIRGVSSPDHIFLPIPNWEHKENPETEEDVGPVVQHIYELRNNGPSSFSKAMLHLQWPYKYNNNTLLYILHYDIDGPMNCTSDMEINPLRIKISSLQTTEKNDTVAGQGERDHLITKRDLALSEGDIHTLGCGVAQCLKIVCQVGRLDRGKSAILYVKSLLWTETFMNKENQNHSYSLKSSASFNVIEFPYKNLPIEDITNSTLVTTNVTWGIQPAPMPVPVWVIILAVLAGLLLLAVLVFVMYRMGFFKRVRPPQEEQEREQLQPHENGEGNSET

SEQ ID NO: 39 - protein, 995 aa, Artificial sequence
  A novel predicted alternative spliced variant protein product
MAFPPRRRLRLGPRGLPLLLSGLLLPLCRAFNLDVDSPAEYSGPEGSYFGFAVDFFVPSASSRMFLLVGAPKANTTQPGIVEGGQVLKCDWSSTRRCQPIEFDATGNRDYAKDDPLEFKSHQWFGASVRSKQDKILACAPLYHWRTEMKQEREPVGTCFLQDGTKTVEYAPCRSQDIDADGQGFCQGGFSIDFTKADRVLLGGPGSFYWQGQLISDQVAEIVSKYDPNVYSIKYNNQLATRTAQAIFDDSYLGYSVAVGDFNGDGIDDFVSGVPRAARTLGMVYIYDGKNMSSLYNFTGEQMAAYFGFSVAATDINGDDYADVFIGAPLFMDRGSDGKLQEVGQVSVSLQRASGDFQTTKLNGFEVFARFGSAIAPLGDLDQDGFNDIAIAAPYGGEDKKGIVYIFNGRSTGLNAVPSQILEGQWAARSMPPSFGYSMKGATDIDKNGYPDLIVGAFGVDRAILYRARPVITVNAGLEVYPSILNQDNKTCSLPGTALKVSCFNVRFCLKADGKGVLPRKLNFQVELLLDKLKQKGAIRRALFLYSRSPSHSKNMTISRGGLMQCEELIAYLRDESEFRDKLTPITIFMEYRLDYRTAADTTGLQPILNQFTPANISRQAHILLDCGEDNVCKPKLEVSVDSDQKKIYIGDDNPLTLIVKAQNQGEGAYEAELIVSIPLQADFIGVVRNNEALARLSCAFKTENQTRQVVCDLGNPMKAGTQLLAGLRFSVHQQSEMDTSVKFDLQIQSSNLFDKVSPVVSHKVDLAVLAAVEIRGVSSPDHIFLPIPNWEHKENPETEEDVGPVVQHIYEISSLQTTEKNDTVAGQGERDHLITKRDLALSEGDIHTLGCGVAQCLKIVCQVGRLDRGKSAILYVKSLLWTETFMNKENQNHSYSLKSSASFNVIEFPYKNLPIEDITNSTLVTTNVTWGIQPAPMPVPVWVIILAVLAGLLLLAVLVFVMYRMGFFKRVRPPQEEQEREQLQPHENGEGNSET

SEQ ID NO: 40 - protein, 1341 aa, Artificial sequence
  A novel predicted alternative spliced variant protein product
MKAPAVLAPGILVLLFTLVQRSNGECKEALAKSEMNVNMKYQLPNFTAETPIQNVILHEHHIFLGATNYIYVLNEEDLQKVAEYKTGPVLEHPDCFPCQDCSSKANLSGGVWKDNINMALVVDTYYDDQLISCGSVNRGTCQRHVFPHNHTADIQSEVHCIFSPQIEEPSQCPDCVVSALGAKVLSSVKDRFINFFVGNTINSSYFPDHPLHSISVRRLKETKDGFMFLTDQSYIDVLPEFRDSYPIKYVHAFESNNFIYFLTVQRETLDAQTFHTRIIRFCSINSGLHSYMEMPLECILTEKRKKRSTKKEVFNILQAAYVSKPGAQLARQIGASLNDDILFGVFAQSKPDSAEPMDRSAMCAFPIKYVNDFFNKIVNKNNVRCLQHFYGPNHEHCFNRTLLRNSSGCEARRDEYRTEFTTALQRVDLFMGQFSEVLLTSISTFIKGDLTIANLGTSEGRFMQVVVSRSGPSTPHVNFLLDSHPVSPEVIVEHTLNQNGYTLVITGKKITKIPLNGLGCRHFQSCSQCLSAPPFVQCGWCHDKCVRSEECLSGTWTQQICLPAIYKVFPNSAPLEGGTRLTICGWDFGFRRNNKFDLKKTRVLLGNESCTLTLSESTMNTLKCTVGPAMNKHFNMSIIISNGHGTTQYSTFSYVDPVITSISPKYGPMAGGTLLTLTGNYLNSGNSRHISIGGKTCTLKSVSNSILECYTPAQTISTEFAVKLKIDLANRETSIFSYREDPIVYEIHPTKSFISGGSTITGVGKNLNSVSVPRMVINVHEAGRNFTVACQHRSNSEIICCTTPSLQQLNLQLPLKTKAFFMLDGILSKYFDLIYVHNPVFKPFEKPVMISMGNENVLEIKWKQAISSTVLGKVIVQPDQNFTGLIAGVVSISTALLLLLGFFLWLKKRKQIKDLGSELVRYDARVHTPHLDRLVSARSVSPTTEMVSNESVDYRATFPEDQFPNSSQNGSCRQVQYPLTDMSPILTSGDSDISSPLLQNTVHIDLSALNPELVQAVQHVVIGPSSLIVHFNEVIGRGHFGCVYHGTLLDNDGKKIHCAVKSLNRITDIGEVSQFLTEGIIMKDFSHPNVLSLLGICLRSEGSPLVVLPYMKHGDLRNFIRNETHNPTVKDLIGFGLQVAKGMKYLASKKFVHRDLAARNCMLDEKFTVKVADFGLARDMYDKEYYSVHNKTGAKLPVKWMALESLQTQKFTTKSDVWSFGVVLWELMTRGAPPYPDVNTFDITVYLLQGRRLLQPEYCPDPLYEVMLKCWHPKAEMRPSFSELVSRISAIFSTFIGEHYVHVNATYVNVKCVAPYPSLLSSEDNADDEVDTRPASFWETS

SEQ ID NO: 41 - protein, 1343 aa, Artificial sequence
  A novel predicted alternative spliced variant protein product
MKAPAVLAPGILVLLFTLVQRSNGECKEALAKSEMNVNMKYQLPNFTAETPIQNVILHEHHIFLGATNYIYVLNEEDLQKVAEYKTGPVLEHPDCFPCQDCSSKANLSGGVWKDNINMALVVDTYYDDQLISCGSVNRGTCQRHVFPHNHTADIQSEVHCIFSPQIEEPSQCPDCVVSALGAKVLSSVKDRFINFFVGNTINSSYFPDHPLHSISVRRLKETKDGFMFLTDQSYIDVLPEFRDSYPIKYVHAFESNNFIYFLTVQRETLDAQTFHTRIIRFCSINSGLHSYMEMPLECILTEKRKKRSTKKEVFNILQAAYVSKPGAQLARQIGASLNDDILFGVFAQSKPDSAEPMDRSAMCAFPIKYVNDFFNKIVNKNNVRCLQHFYGPNHEHCFNRTLLRNSSGCEARRDEYRTEFTTALQRVDLFMGQFSEVLLTSISTFIKGDLTIANLGTSEGRFMQVVVSRSGPSTPHVNFLLDSHPVSPEVIVEHTLNQNGYTLVITGKKITKIPLNGLGCRHFQSCSQCLSAPPFVQCGWCHDKCVRSEECLSGTWTQQICLPAIYKVFPNSAPLEGGTRLTICGWDFGFRRNNKFDLKKTRVLLGNESCTLTLSESTMNTLKCTVGPAMNKHFNMSIIISNGHGTTQYSTFSYVDPVITSISPKYGPMAGGTLLTLTGNYLNSGNSRHISIGGKTCTLKSVSNSILECYTPAQTISTEFAVKLKIDLANRETSIFSYREDPIVYEIHPTKSFISGGSTITGVGKNLNSVSVPRMVINVHEAGRNFTVACQHRSNSEIICCTTPSLQQLNLQLPLKTKAFFMLDGILSKYFDLIYVHNPVFKPFEKPVMISMGNENVLEIKGNDIDPEAVKGEVLKVGNKSCENIHLHSEAVLCTVPNDLLKLNSELNIEWKQAISSTVLGKVIVQPDQNFTGLIAGVVSISTALLLLLGFFLWLKKRKQIKDQFPNSSQNGSCRQVQYPLTDMSPILTSGDSDISSPLLQNTVHIDLSALNPELVQAVQHVVIGPSSLIVHFNEVIGRGHFGCVYHGTLLDNDGKKIHCAVKSLNRITDIGEVSQFLTEGIIMKDFSHPNVLSLLGICLRSEGSPLVVLPYMKHGDLRNFIRNETHNPTVKDLIGFGLQVAKGMKYLASKKFVHRDLAARNCMLDEKFTVKVADFGLARDMYDKEYYSVHNKTGAKLPVKWMALESLQTQKFTTKSDVWSFGVVLWELMTRGAPPYPDVNTFDITVYLLQGRRLLQPEYCPDPLYEVMLKCWHPKAEMRPSFSELVSRISAIFSTFIGEHYVHVNATYVNVKCVAPYPSLLSSEDNADDEVDTRPASFWETS

SEQ ID NO: 42 - protein, 1176 aa, Artificial sequence
  A novel predicted alternative spliced variant protein product
MKAPAVLAPGILVLLFTLVQRSNGECKEALAKSEMNVNMKYQLPNFTAETPIQNVILHEHHIFLGATNYIYVLNEEDLQKVAEYKTGPVLEHPDCFPCQDCSSKANLSGGVWKDNINMALVVDTYYDDQLISCGSVNRGTCQRHVFPHNHTADIQSEVHCIFSPQIEEPSQCPDCVVSALGAKVLSSVKDRFINFFVGNTINSSYFPDHPLHSISVRRLKETKDGFMFLTDQSYIDVLPEFRDSYPIKYVHAFESNNFIYFLTVQRETLDAQTFHTRIIRFCSINSGLHSYMEMPLECILTEKRKKRSTKKEVFNILQAAYVSKPGAQLARQIGASLNDDILFGVFAQSKPDSAEPMDRSAMCAFPIKYVNDFFNKIVNKNNVRCLQHFYGPNHEHCFNRTLLRNSSGCEARRDEYRTEFTTALQRVDLFMGQFSEVLLTSISTFIKGDLTIANLGTSEGRFMQVVVSRSGPSTPHVNFLLDSHPVSPEVIVEHTLNQNGYTLVITGKKITKIPLNGLGCRHFQSCSQCLSAPPFVQCGWCHDKCVRSEECLSGTWTQQICLPAIYKVFPNSAPLEGGTRLTICGWDFGFRRNNKFDLKKTRVLLGNESCTLTLSESTMNTLKCTVGPAMNKHFNMSIIISNGHGTTQYSTFSYVDPVITSISPKYGPMAGGTLLTLTGNYLNSGNSRHISIGGKTCTLKSVSNSILECYTPAQTISTEFAVKLKIDLANRETSIFSYREDPIVYEIHPTKSFISGGSTITGVGKNLNSVSVPRMVINVHEAGRNFTVACQHRSNSEIICCTTPSLQQLNLQLPLKTKAFFMLDGILSKYFDLIYVHNPVFKPFEKPVMISMGNENVLEIKGNDIDPEAVKGEVLKVGNKSCENIHLHSEAVLCTVPNDLLKLNSELNIEWKQAISSTVLGKVIVQPDQNFTGLIAGVVSISTALLLLLGFFLWLKKRKQIKDLGSELVRYDARVHTPHLDRLVSARSVSPTTEMVSNESVDYRATFPEDQFPNSSQNGSCRQVQYPLTDMSPILTSGDSDISSPLLQNTVHIDLSALNPELVQAVQHVVIGPSSLIVHFNEVIGRGHFGCVYHGTLLDNDGKKIHCAVKSLNRITDIGEVSQFLTEGIIMKDFSHPNVLSLLGICLRSEGSPLVVLPYMKHGDLRNFIRNETHAG

SEQ ID NO: 43 - protein, 672 aa, Artificial sequence
  A novel predicted alternative spliced variant protein product
MALLLVSLLAFLSLGSGCHHRICHCSNRVFLCQESKVTEIPSDLPRNAIELRFVLTKLRVIQKGAFSGFGDLEKIEISQNDVLEVIEADVFSNLPKLHEIRIEKANNLLYINPEAFQNLPNLQYLLISNTGIKHLPDVHKIHSLQKVLLDIQDNINIHTIERNSFVGLSFESVILNLSDNNNLEELPNDVFHGASGPVILDISRTRIHSLPSYGLENLKKLRARSTYNLKKLPTLEKLVALMEASLTYPSHCCAFANWRRQISELHPICNKSILRQEVDYMTQTRGQRSSLAEDNESSYSRGFDMTYTEFDYDLCNEVVDVTCSPKPDAFNPCEDIMGYNILRVLIWFISILAITGNIIVLVILTTSQYKLTVPRFLMCNLAFADLCIGIYLLLIASVDIHTKSQYHNYAIDWQTGAGCDAAGFFTVFASELSVYTLTAITLERWHTITHAMQLDCKVQLRHAASVMVMGWIFAFAAALFPIFGISSYMKVSICLPMDIDSPLSQLYVMSLLVLNVLAFVVICGCYIHIYLTVRNPNIVSSSSDTRIAKRMAMLIFTDFLCMAPISFFAISASLKVPLITVSKAKILLVLFHPINSCANPFLYAIFTKNFRRDFFILLSKCGCYEMQAQIYRTETSSTVHNTHPRNGHCSSAPRVTNGSTYILVPLSHLAQN

SEQ ID NO: 44 - protein, 670 aa, Artificial sequence
  A novel predicted alternative spliced variant protein product
MALLLVSLLAFLSLGSGCHHRICHCSNRVFLCQESKVTEIPSDLPRNAIELRFVLTKLRVIQKGAFSGFGDLEKIEISQNDVLEVIEADVFSNLPKLHEIRIEKANNLLYINPEAFQNLPNLQYLLISNTGIKHLPDVHKIHSLQKVLLDIQDNINIHTIERNSFVGLSFESVILWLNKNGIQEIHNCAFNGTQLDELDISRTRIHSLPSYGLENLKKLRARSTYNLKKLPTLEKLVALMEASLTYPSHCCAFANWRRQISELHPICNKSILRQEVDYMTQTRGQRSSLAEDNESSYSRGFDMTYTEFDYDLCNEVVDVTCSPKPDAFNPCEDIMGYNILRVLIWFISILAITGNIIVLVILTTSQYKLTVPRFLMCNLAFADLCIGIYLLLIASVDIHTKSQYHNYAIDWQTGAGCDAAGFFTVFASELSVYTLTAITLERWHTITHAMQLDCKVQLRHAASVMVMGWIFAFAAALFPIFGISSYMKVSICLPMDIDSPLSQLYVMSLLVLNVLAFVVICGCYIHIYLTVRNPNIVSSSSDTRIAKRMAMLIFTDFLCMAPISFFAISASLKVPLITVSKAKILLVLFHPINSCANPFLYAIFTKNFRRDFFILLSKCGCYEMQAQIYRTETSSTVHNTHPRNGHCSSAPRVTNGSTYILVPLSHLAQN

SEQ ID NO: 45 - protein, 198 aa, Artificial sequence
  A novel predicted alternative spliced variant protein product
MALLLVSLLAFLSLGSGCHHRICHCSNRVFLCQESKVTEIPSDLPRNAIELRFVLTKLRVIQKGAFSGFGDLEKIEISQNDVLEVIEADVFSNLPKLHEIRIEKANNLLYINPEAFQNLPNLQYLLISNTGIKHLPDVHKIHSLQKVLLDIQDNINIHTIERNSFVGLSFESVILWLNKNGIQEIHNCAFNGTQLDEL

SEQ ID NO: 46 - protein, 729 aa, Artificial sequence
  A novel predicted alternative spliced variant protein product
MALLLVSLLAFLSLGSGCHHRICHCSNRVFLCQESKVTEIPSDLPRNAIELRFVLTKLRVIQKGAFSGFGDLEKIEISQNDVLEVIEADVFSNLPKLHEIRIEKANNLLYINPEAFQNLPNLQYLLISNTGIKHLPDVHKIHSLQKVLLDIQDNINIHTIERNSFVGLSFESVILWLNKNGIQEIHNCAFNGTQLDELNLSDNNNLEELPNDVFHGASGPVILNRRTRTPTEPNVLLAKYPSGQGVLEEPESLSSSIDISRTRIHSLPSYGLENLKKLRARSTYNLKKLPTLEKLVALMEASLTYPSHCCAFANWRRQISELHPICNKSILRQEVDYMTQTRGQRSSLAEDNESSYSRGFDMTYTEFDYDLCNEVVDVTCSPKPDAFNPCEDIMGYNILRVLIWFISILAITGNIIVLVILTTSQYKLTVPRFLMCNLAFADLCIGIYLLLIASVDIHTKSQYHNYAIDWQTGAGCDAAGFFTVFASELSVYTLTAITLERWHTITHAMQLDCKVQLRHAASVMVMGWIFAFAAALFPIFGISSYMKVSICLPMDIDSPLSQLYVMSLLVLNVLAFVVICGCYIHIYLTVRNPNIVSSSSDTRIAKRMAMLIFTDFLCMAPISFFAISASLKVPLITVSKAKILLVLFHPINSCANPFLYAIFTKNFRRDFFILLSKCGCYEMQAQIYRTETSSTVHNTHPRNGHCSSAPRVTNGSTYILVPLSHLAQN

SEQ ID NO: 47 - protein, 675 aa, Artificial sequence
  A novel predicted alternative spliced variant protein product
MKQRFSALQLLKLLLLLQPPLPRALREALCPEPCNCVPDGALRCPGPTAGLTRLEISQIDSLERIEANAFDNLLNLSEILIQNTKNLRYIEPGAFINLPRLKYLSICNTGIRKFPDVTKVFSSESNFILEICDNLHITTIPGNAFQGMNNESVTLKLYGNGFEEVQSHAFNGTTLTSLELKENVHLEKMHNGAFRGATGPKTLDISSTKLQALPSYGLESIQRLIATSSYSLKKLPSRETFVNLLEATLTYPSHCCAFRNLPTKEQNFSHSISENFSKQCESTVRKVSNKTLYSSMLAESELSGWDYEYGFCLPKTPRCAPEPDAFNPCEDIMGYDFLRVLIWLINILAIMGNMTVLFVLLTSRYKLTVPRFLMCNLSFADFCMGLYLLLIASVDSQTKGQYYNHAIDWQTGSGCSTAGFFTVFASELSVYTLTVITLERWHTITYAIHLDQKLRLRHAILIMLGGWLFSSLIAMLPLVGVSNYMKVSICFPMDVETTLSQVYILTILILNVVAFFIICACYIKIYFAVRNPELMATNKDTKIAKKMAILIFTDFTCMAPISFFAISAAFKVPLITVTNSKVLLVLFYPINSCANPFLYAIFTKTFQRDFFLLLSKFGCCKRRAELYRRKDFSAYTSNCKNGFTGSNKPSQSTLKLSTLHCQGTALLDKTRYTEC

SEQ ID NO: 48 - protein, 677 aa, Artificial sequence
  A novel predicted alternative spliced variant protein product
MKQRFSALQLLKLLLLLQPPLPRALREALCPEPCNCVPDGALRCPGPTAGLTRLSLAYLPVKVIPSQAFRGLNEVIKISEILIQNTKNLRYIEPGAFINLPRLKYLSICNTGIRKFPDVTKVFSSESNFILEICDNLHITTIPGNAFQGMNNESVTLKLYGNGFEEVQSHAFNGTTLTSLELKENVHLEKMHNGAFRGATGPKTLDISSTKLQALPSYGLESIQRLIATSSYSLKKLPSRETFVNLLEATLTYPSHCCAFRNLPTKEQNFSHSISENFSKQCESTVRKVSNKTLYSSMLAESELSGWDYEYGFCLPKTPRCAPEPDAFNPCEDIMGYDFLRVLIWLINILAIMGNMTVLFVLLTSRYKLTVPRFLMCNLSFADFCMGLYLLLIASVDSQTKGQYYNHAIDWQTGSGCSTAGFFTVFASELSVYTLTVITLERWHTITYAIHLDQKLRLRHAILIMLGGWLFSSLIAMLPLVGVSNYMKVSICFPMDVETTLSQVYILTILILNVVAFFIICACYIKIYFAVRNPELMATNKDTKIAKKMAILIFTDFTCMAPISFFAISAAFKVPLITVTNSKVLLVLFYPINSCANPFLYAIFTKTFQRDFFLLLSKFGCCKRRAELYRRKDFSAYTSNCKNGFTGSNKPSQSTLKLSTLHCQGTALLDKTRYTEC

SEQ ID NO: 49 - protein, 678 aa, Artificial sequence
  A novel predicted alternative spliced variant protein product
AMKQRFSALQLLKLLLLLQPPLPRALREALCPEPCNCVPDGALRCPGPTAGLTRLSLAYLPVKVIPSQAFRGLNEVIKIEISQIDSLERIEANAFDNLLNLSEILIQNTKNLRYIEPGAFINLPRLKYLFILEICDNLHITTIPGNAFQGMNNESVTLKLYGNGFEEVQSHAFNGTTLTSLELKENVHLEKMHNGAFRGATGPKTLDISSTKLQALPSYGLESIQRLIATSSYSLKKLPSRETFVNLLEATLTYPSHCCAFRNLPTKEQNFSHSISENFSKQCESTVRKVSNKTLYSSMLAESELSGWDYEYGFCLPKTPRCAPEPDAFNPCEDIMGYDFLRVLIWLINILAIMGNMTVLFVLLTSRYKLTVPRFLMCNLSFADFCMGLYLLLIASVDSQTKGQYYNHAIDWQTGSGCSTAGFFTVFASELSVYTLTVITLERWHTITYAIHLDQKLRLRHAILIMLGGWLFSSLIAMLPLVGVSNYMKVSICFPMDVETTLSQVYILTILILNVVAFFIICACYIKIYFAVRNPELMATNKDTKIAKKMAILIFTDFTCMAPISFFAISAAFKVPLITVTNSKVLLVLFYPINSCANPFLYAIFTKTFQRDFFLLLSKFGCCKRRAELYRRKDFSAYTSNCKNGFTGSNKPSQSTLKLSTLHCQGTALLDKTRYTEC

SEQ ID NO: 50 - protein, 673 aa, Artificial sequence
  A novel predicted alternative spliced variant protein product
MKQRFSALQLLKLLLLLQPPLPRALREALCPEPCNCVPDGALRCPGPTAGLTRLSLAYLPVKVIPSQAFRGLNEVIKIEISQIDSLERIEANAFDNLLNLSEILIQNTKNLRYIEPGAFINLPRLKYLSICNTGIRKFPDVTKVFSSESNFILKLYGNGFEEVQSHAFNGTTLTSLELKENVHLEKMHNGAFRGATGPKTLDISSTKLQALPSYGLESIQRLIATSSYSLKKLPSRETFVNLLEATLTYPSHCCAFRNLPTKEQNFSHSISENFSKQCESTVRKVSNKTLYSSMLAESELSGWDYEYGFCLPKTPRCAPEPDAFNPCEDIMGYDFLRVLIWLINILAIMGNMTVLFVLLTSRYKLTVPRFLMCNLSFADFCMGLYLLLIASVDSQTKGQYYNHAIDWQTGSGCSTAGFFTVFASELSVYTLTVITLERWHTITYAIHLDQKLRLRHAILIMLGGWLFSSLIAMLPLVGVSNYMKVSICFPMDVETTLSQVYILTILILNVVAFFIICACYIKIYFAVRNPELMATNKDTKIAKKMAILIFTDFTCMAPISFFAISAAFKVPLITVTNSKVLLVLFYPINSCANPFLYAIFTKTFQRDFFLLLSKFGCCKRRAELYRRKDFSAYTSNCKNGFTGSNKPSQSTLKLSTLHCQGTALLDKTRYTEC

SEQ ID NO: 51 - protein, 678 aa, Artificial sequence
  A novel predicted alternative spliced variant protein product
MKQRFSALQLLKLLLLLQPPLPRALREALCPEPCNCVPDGALRCPGPTAGLTRLSLAYLPVKVIPSQAFRGLNEVIKIEISQIDSLERIEANAFDNLLNLSEILIQNTKNLRYIEPGAFINLPRLKYLSICNTGIRKFPDVTKVFSSESNFILEICDNLHITTIPGNAFQGMNNESVTLSLELKENVHLEKMHNGAFRGATGPKTLDISSTKLQALPSYGLESIQRLIATSSYSLKKLPSRETFVNLLEATLTYPSHCCAFRNLPTKEQNFSHSISENFSKQCESTVRKVSNKTLYSSMLAESELSGWDYEYGFCLPKTPRCAPEPDAFNPCEDIMGYDFLRVLIWLINILAIMGNMTVLFVLLTSRYKLTVPRFLMCNLSFADFCMGLYLLLIASVDSQTKGQYYNHAIDWQTGSGCSTAGFFTVFASELSVYTLTVITLERWHTITYAIHLDQKLRLRHAILIMLGGWLFSSLIAMLPLVGVSNYMKVSICFPMDVETTLSQVYILTILILNVVAFFIICACYIKIYFAVRNPELMATNKDTKIAKKMAILIFTDFTCMAPISFFAISAAFKVPLITVTNSKVLLVLFYPINSCANPFLYAIFTKTFQRDFFLLLSKFGCCKRRAELYRRKDFSAYTSNCKNGFTGSNKPSQSTLKLSTLHCQGTALLDKTRYTEC

SEQ ID NO: 52 - protein, 672 aa, Artificial sequence
  A novel predicted alternative spliced variant protein product
MKQRFSALQLLKLLLLLQPPLPRALREALCPEPCNCVPDGALRCPGPTAGLTRLSLAYLPVKVIPSQAFRGLNEVIKIEISQIDSLERIEANAFDNLLNLSEILIQNTKNLRYIEPGAFINLPRLKYLSICNTGIRKFPDVTKVFSSESNFILEICDNLHITTIPGNAFQGMNNESVTLKLYGNGFEEVQSHAFNGTTLTSLELKENVHLEKMHNGAFRGATGPKTLDISSTKLQALPSYGLESIQRLIATSSYSLKKLPSRETFVNLLEATLTYPSHCCAFRNLPTKEYSSMLAESELSGWDYEYGFCLPKTPRCAPEPDAFNPCEDIMGYDFLRVLIWLINILAIMGNMTVLFVLLTSRYKLTVPRFLMCNLSFADFCMGLYLLLIASVDSQTKGQYYNHAIDWQTGSGCSTAGFFTVFASELSVYTLTVITLERWHTITYAIHLDQKLRLRHAILIMLGGWLFSSLIAMLPLVGVSNYMKVSICFPMDVETTLSQVYILTILILNVVAFFIICACYIKIYFAVRNPELMATNKDTKIAKKMAILIFTDFTCMAPISFFAISAAFKVPLITVTNSKVLLVLFYPINSCANPFLYAIFTKTFQRDFFLLLSKFGCCKRRAELYRRKDFSAYTSNCKNGFTGSNKPSQSTLKLSTLHCQGTALLDKTRYTEC

SEQ ID NO: 53 - protein, 153 aa, Artificial sequence
  A novel predicted alternative spliced variant protein product
MKQRFSALQLLKLLLLLQPPLPRALREALCPEPCNCVPDGALRCPGPTAGLTRLSLAYLPVKVIPSQAFRGLNEVIKIEISQIDSLERIEANAFDNLLNLSEILIQNTKNLRYIEPGAFINLPRLKYLSICNTGIRKFPDVTKVFSSESNFIL

SEQ ID NO: 54 - protein, 190 aa, Artificial sequence
  A novel predicted alternative spliced variant protein product
MAALASSLIRQKREVREPGGSRPVSAQRRVCPRGTKSLCQKQLLILLSKVRLCGGRPARPDRGPAFTHFNLIPVGLRVVTIQSAKLGHYMAMNAEGLLYSSPHFTAECRFKECVFENYYVLYASALYRQRRSGRAWYLGLDKEGQVMKGNRVKKTKAAAHFLPKLLEVAMYQEPSLHSVPEASPSSPPAP

SEQ ID NO: 55 - protein, 206 aa, Artificial sequence
  A novel predicted alternative spliced variant protein product
MAAAIASSLIRQKRQARESNSDRVSASKRRSSPSKDGRSLCERHVLGVFSKVRFCSGRKRPVRRRPALFNLIPVGLRVVAIQGVKASLYVAMNGEGYLYSSDVFTPECKFKESVFENYYVIYSSTLYRQQESGRAWFLGLNKEGQIMKGNRVKKTKPSSHFVPKPIEVCMYREPSLHEIGEKQGRSRKSSGTPTMNGGKVVNQDST

SEQ ID NO: 56 - protein, 144 aa, Artificial sequence
  A novel predicted alternative spliced variant protein product
MESKALFNLIPVGLRVVAIQGVKASLYVAMNGEGYLYSSDVFTPECKFKESVFENYYVIYSSTLYRQQESGRAWFLGLNKEGQIMKGNRVKKTKPSSHFVPKPIEVCMYREPSLHEIGEKQGRSRKSSGTPTMNGGKVVNQDST

SEQ ID NO: 57 - protein, 208 aa, Artificial sequence
  A novel predicted alternative spliced variant protein product
MAAAIASSLIRQKRQAREREKSNACKCVSSPSKGKTSCDKNKLNVFSRVKLFGSKKRRRRRPALFNLIPVGLRVVAIQGVQTKLYLAMNSEGYLYTSELFTPECKFKESVFENYYVTYSSMIYRQQQSGRGWYLGLNKEGEIMKGNHVKKNKPAAHFLPKPLKVAMYKEPSLHDLTEFSRSGSGTPTKSRSVSGVLNGGKSMSHNEST

SEQ ID NO: 58 - protein, 155 aa, Artificial sequence
  A novel predicted alternative spliced variant protein product
MALLRKSYSALFNLIPVGLRVVAIQGVQTKLYLAMNSEGYLYTSELFTPECKFKESVFENYYVTYSSMIYRQQQSGRGWYLGLNKEGEIMKGNHVKKNKPAAHFLPKPLKVAMYKEPSLHDLTEFSRSGSGTPTKSRSVSGVLNGGKSMSHNEST

SEQ ID NO: 59 - protein, 104 aa, Artificial sequence
  A novel predicted alternative spliced variant protein product
MAAAIASSLIRQKRQAREREKSNACKCVSSPSKGKTSCDKNKLNVFSRVKLFGSKKRRRRRPEPQLKGIVTKLYSRQGYHLQLQADGTIDGTKDEDSTYRTFHT

SEQ ID NO: 60 - protein, 51 aa, Artificial sequence
  A novel predicted alternative spliced variant protein product
MALLRKSYSEPQLKGIVTKLYSRQGYHLQLQADGTIDGTKDEDSTYRTFHT

SEQ ID NO: 61 - protein, 183 aa, Artificial sequence [sequence omitted]

SEQ ID NO: 62 - protein, 216 aa, Artificial sequence
  A novel predicted alternative spliced variant protein product
MAAAPLLLLLLLVPVPLLPLLAQGPGGALGNRHAVYWNSSNQHLRREGYTVQVNVNDYLDIYCPHYNSSGVGPGAGPGPGGGAEQYVLYMVSRNGYRTCNASQGFKRWECNRPHAPHSPIKFSEKFQRYSAFSLGYEFHAGHEYYYISSHSGEKPVPTLPQFTMGPNVKINVLEDFEGENPQVPKLEKSISGTSPKREHLPLAVGIAFFLMTFLAS

SEQ ID NO: 63 - protein, 212 aa, Artificial sequence
  A novel predicted alternative spliced variant protein product
MAAAPLLLLLLLVPVPLLPLLAQGPGGALGNRHAVYWNSSNQHLRREGYTVQVNVNDYLDIYCPHYNSSGVGPGAGPGPGGGAEQYVLYMVSRNGYRTCNASQGFKRWECNRPHAPHSPIKFSEKFQRYSAFSLGYEFHAGHEYYYISTPTHNLHWKCLRMKVFVCCASKDFEGENPQVPKLEKSISGTSPKREHLPLAVGIAFFLMTFLAS

SEQ ID NO: 64 - protein, 206 aa, Artificial sequence
  A novel predicted alternative spliced variant protein product
MLHVEMLTLVFLVLWMCVFSQDPGSKAVADRYAVYWNSSNPRFQRGDYHIDVCINDYLDVFCPHYEDSVPEDKTERYVLYMVNFDGYSACDHTSKGFKRWECNRPHSPNGPLKFSEKFQLFTPFSLGFEFRPGREYFYIYSCMKTIGVHDRVFDVNDKVENSLEPADDTVHESAEPSRGENAAQTPRIPSRLLAILLFLLAMLLTL

SEQ ID NO: 65 - protein, 202 aa, Artificial sequence
  A novel predicted alternative spliced variant protein product
MLHVEMLTLVFLVLWMCVFSQDPGSKAVADRYAVYWNSSNPRFQRGDYHIDVCINDYLDVFCPHYEDSVPEDKTERYVLYMVNFDGYSACDHTSKGFKRWECNRPHSPNGPLKFSEKFQLFTPFSLGFEFRPGREYFYISSAIPDNGRRSCLKLKVFVRPTNDDTVHESAEPSRGENAAQTPRIPSRLLAILLFLLAMLLTL

SEQ ID NO: 66 - protein, 51 aa, Artificial sequence
  A novel predicted alternative spliced variant protein product
MAVRRDSVWKYCWGVLMVLCRTAISKSIVLEPIYWNSSNSNYIKWVFGGPG

SEQ ID NO: 67 - protein, 302 aa, Artificial sequence
  A novel predicted alternative spliced variant protein product
MAVRRDSVWKYCWGVLMVLCRTAISKSIVLEPIYWNSSNSKFLPGQGLVLYPQIGDKLDIICPKVDSKTVGQYEYYKVYMVDKDQADRCTIKKENTPLLNCAKPDQDIKFTIKFQEFSPNLWGLEFQKNKDYYIIYASSAGSTRNKDPTRRPELEAGTNGRSSTTSPFVKPNPGSSTDGNSAGHSGNNILGSEVALFAGIASGCIIFIVIIITLVVLLLKYRRRHRKHSPQHTTTLSLSTLATPKRSGNNNGSEPSDIIIPLRTADSVFCPHYEKVSGDYGHPVYIVQEMPPQSPANIYYKV

SEQ ID NO: 68 - protein, 295 aa, Artificial sequence
  A novel predicted alternative spliced variant protein product
MAVRRDSVWKYCWGVLMVLCRTAISKSIVLEPIYWNSSNSKFLPGQGLVLYPQIGDKLDIICPKVDSKTVGQYEYYKVYMVDKDQADRCTIKKENTPLLNCAKPDQDIKFTIKFQEFSPNLWGLEFQKNKDYYIISTSNGSLEGLDNQEGGVCQTRAMKILMKVGQGSSTDGNSAGHSGNNILGSEVALFAGIASGCIIFIVIIITLVVLLLKYRRRHRKHSPQHTTTLSLSTLATPKRSGNNNGSEPSDIIIPLRTADSVFCPHYEKVSGDYGHPVYIVQEMPPQSPANIYYKV

SEQ ID NO: 69 - protein, 38 aa, Artificial sequence
  A novel predicted alternative spliced variant protein product
MAGIFYFALFSCLFGICDAVTGSRVYPANEVGGSEYHG

SEQ ID NO: 70 - protein, 111 aa, Artificial sequence
  A novel predicted alternative spliced variant protein product
MAGIFYFALFSCLFGICDAVTGSRVYPANEVTLLDSRSVQGELGWIASPLEGGLAKLDITRLSPRMPPVPSAHPTATLSGKEPPRAPVTEAFSELTTMLPLCPAPVHHLLP

SEQ ID NO: 71 - protein, 934 aa, Artificial sequence
  A novel predicted alternative spliced variant protein product
MAGIFYFALFSCLFGICDAVTGSRVYPANEVTLLDSRSVQGELGWIASPLEGGWEEVSIMDEKNTPIRTYQVCNVMEPSQNNWLRTDWITREGAQRVYIEIKFTLRDCNSLPGVMGTCKETFNLYYYESDNDKERFIRENQFVKIDTIAADESFTQVDIGDRIMKLNTEIRDVGPLSKKGFYLAFQDVGACIALVSVRVFYKKCPLTVRNLAQFPDTITGADTSSLVEVRGSCVNNSEEKDVPKMYCGADGEWLVPIGNCLCNAGHEERSGECQGPPSAPLNLISNVNETSVNLEWSSPQNTGGRQDISYNVVCKKCGAGDPSKCRPCGSGVHYTPQQNGLKTTKVSITDLLAHTNYTFEIWAVNGVSKYNPNPDQSVSVTVTTNQAAPSSIALVQAKEVTRYSVALAWLEPDRPNGVILEYEVKYYEKDQNERSYRIVRTAARNTDIKGLNPLTSYVFHVRARTAAGYGDFSEPLEVTTNTVPSRIIGDGANSTVLLVSVSGSVVLVVILIAAFVISRRRSKYSKAKQEADEEKHLNQGVRTYVDPFTYEDPNQAVREFAKEIDASCIKIEKVIGVGEFGEVCSGRLKVPGKREICVAIKTLKAGYTDKQRRDFLSEASIMGQFDHPNIIHLEGVVTKCKPVMIITEYMENGSLDAFLRKNDGRFTVIQLVGMLRGIGSGMKYLSDMSYVHRDLAARNILVNSNLVCKVSDFGMSRVLEDDPEAAYTTRGGKIPIRWTAPEAIAYRKFTSASDVWSYGIVMWEVMSYGERPYWDMSNQDVIKAIEEGYRLPPPMDCPIALHQLMLDCWQKERSDRPKFGQIVNMLDKLIRNPNSLKRTGTESSRPNTALLDPSSPEFSAVVSVGDWLQAIKMDRYKDNFTAAGYTTLEAVVHVNQEDLARIGITAITHQNKILSSVQAMRTQMQQMHGRMVPV

SEQ ID NO: 72 - protein, 691 aa, Artificial sequence
  A novel predicted alternative spliced variant protein product
MAGIFYFALFSCLFGICDAVTGSRVYPANEVTLLDSRSVQGELGWIASPLEGGWEEVSIMDEKNTPIRTYQVCNVMEPSQNNWLRTDWITREGAQRVYIEIKFTLRDCNSLPGVMGTCKETFNLYYYESDNDKERFIRENQFVKIDTIAADESFTQVDIGDRIMKLNTEIRDVGPLSKKGFYLAFQDVGACIALVSVRVFYKKCPLTVRNLAQFPDTITGADTSSLVEVRGSCVNNSEEKDVPKMYCGADGEWLVPIGNCLCNAGHEERSGECQACKIGYYKALSTDATCAKCPPHSYSVWEGATSCTCDRGFFRADNDAASMPCTRPPSAPLNLISNVNETSVNLEWSSPQNTGGRQDISYNVVCKKCGAGDPSKCRPCGSGVHYTPQQNGLKTTKVSITDLLAHTNYTFEIWAVNGVSKYNPNPDQSVSVTVTTNQAAPSSIALVQAKEVTRYSVALAWLEPDRPNGVILEYEVKYYEKDQNERSYRIVRTAARNTDIKGLNPLTSYVFHVRARTAAGYGDFSEPLEVTTNTVPSRIIGDGANSTVLLVSVSGSVVLVVILIAAFVISRRRSKYSKAKQEADEEKHLNQGVRTYVDPFTYEDPNQAVREFAKEIDASCIKIEKVIGVGEFGEVCSGRLKVPGKREICVAIKTLKAGYTDKQRRDFLSEASIMGQFDHPNIIHLEGVVTK

SEQ ID NO: 73 - protein, 985 aa, Artificial sequence
  A novel predicted alternative spliced variant protein product
MRGSGPRGAGHRRPPSGGGDTPITPASLAGCYSAPRRAPLWTCLLLCAALRTLLASPSNEVNLLDSRTVMGDLGWIAFPKNGWEEIGEVDENYAPIHTYQVCKVMEQNQNNWLLTSWISNEGASRIFIELKFTLRDCNSLPGGLGTCKETFNMYYFESDDQNGRNIKENQYIKIDTIAADESFTELDLGDRVMKLNTEVRDVGPLSKKGFYLAFQDVGACIALVSVRVYYKKCPSVVRHLAVFPDTITGADSSQLLEVSGSCVNHSVTDEPPKMHCSAEGEWLVPIGKCMCKAGYEEKNGTCQGPPSAPRNAISNVNETSVFLEWIPPADTGGRKDVSYYIACKKCNSHAGVCEECGGHVRYLPRQSGLKNTSVMMVDLLAHTNYTFEIEAVNGVSDLSPGARQYVSVNVTTNQAAPSPVTNVKKGKIAKNSISLSWQEPDRPNGIILEYEIKHFEKDQETSYTIIKSKETTITAEGLKPASVYVFQIRARTAAGYGVFSRRFEFETTPVFAASSDQSQIPVIAVSVTVGVILLAVVIGVLLSGSCCECGCGRASSLCAVAHPILIWRCGYSKAKQDPEEEKMHFHNGHIKLPGVRTYIDPHTYEDPNQAVHEFAKEIEASCITIERVIGAGEFGEVCSGRLKLPGKRELPVAIKTLKVGYTEKQRRDFLGEASIMGQFDHPNIIHLEGVVTKSKPVMIVTEYMENGSLDTFLKKNDGQFTVIQLVGMLRGISAGMKYLSDMGYVHRDLAARNILINSNLVCKVSDFGLSRVLEDDPEAAYTTRGGKIPIRWTAPEAIAFRKFTSASDVWSYGIVMWEVVSYGERPYWEMTNQDVIKAVEEGYRLPSPMDCPAALYQLMLDCWQKERNSRPKFDEIVNMLDKLIRNPSSLKTLVNASCRVSNLLAEHSPLGSGAYRSVGEWLEAIKMGRYTEIFMENGYSSMDAVAQVTLEDLRRLGVTLVGHQKKIMNSLQEMKVQLVNGMVPL

SEQ ID NO: 74 - protein, 925 aa, Artificial sequence
  A novel predicted alternative spliced variant protein product
MRGSGPRGAGHRRPPSGGGDTPITPASLAGCYSAPRRAPLWTCLLLCAALRTLLASPSNEVNLLDSRTVMGDLGWIAFPKNGWEEIGEVDENYAPIHTYQVCKVMEQNQNNWLLTSWISNEGASRIFIELKFTLRDCNSLPGGLGTCKETFNMYYFESDDQNGRNIKENQYIKIDTIAADESFTELDLGDRVMKLNTEVRDVGPLSKKGFYLAFQDVGACIALVSVRVYYKKCPSVVRHLAVFPDTITGADSSQLLEVSGSCVNHSVTDEPPKMHCSAEGEWLVPIGKCMCKAGYEEKNGTCQVCRPGFFKASPHIQSCGKCPPHSYTHEEASTSCVCEKDYFRRESDPPTMACTTPSPVTNVKKGKIAKNSISLSWQEPDRPNGIILEYEIKHFEKDQETSYTIIKSKETTITAEGLKPASVYVFQIRARTAAGYGVFSRRFEFETTPVFAASSDQSQIPVIAVSVTVGVILLAVVIGVLLSGSCCECGCGRASSLCAVAHPILIWRCGYSKAKQDPEEEKMHFHNGHIKLPGVRTYIDPHTYEDPNQAVHEFAKEIEASCITIERVIGAGEFGEVCSGRLKLPGKRELPVAIKTLKVGYTEKQRRDFLGEASIMGQFDHPNIIHLEGVVTKSKPVMIVTEYMENGSLDTFLKKNDGQFTVIQLVGMLRGISAGMKYLSDMGYVHRDLAARNILINSNLVCKVSDFGLSRVLEDDPEAAYTTRGGKIPIRWTAPEAIAFRKFTSASDVWSYGIVMWEVVSYGERPYWEMTNQDVIKAVEEGYRLPSPMDCPAALYQLMLDCWQKERNSRPKFDEIVNMLDKLIRNPSSLKTLVNASCRVSNLLAEHSPLGSGAYRSVGEWLEAIKMGRYTEIFMENGYSSMDAVAQVTLEDLRRLGVTLVGHQKKIMNSLQEMKVQLVNGMVPL

SEQ ID NO: 75 - protein, 582 aa, Artificial sequence
  A novel predicted alternative spliced variant protein product
MRGSGPRGAGHRRPPSGGGDTPITPASLAGCYSAPRRAPLWTCLLLCAALRTLLASPSNEVNLLDSRTVMGDLGWIAFPKNGWEEIGEVDENYAPIHTYQVCKVMEQNQNNWLLTSWISNEGASRIFIELKFTLRDCNSLPGGLGTCKETFNMYYFESDDQNGRNIKENQYIKIDTIAADESFTELDLGDRVMKLNTEVRDVGPLSKKGFYLAFQDVGACIALVSVRVYYKKCPSVVRHLAVFPDTITGADSSQLLEVSGSCVNHSVTDEPPKMHCSAEGEWLVPIGKCMCKAGYEEKNGTCQVCRPGFFKASPHIQSCGKCPPHSYTHEEASTSCVCEKDYFRRESDPPTMACTRPPSAPRNAISNVNETSVFLEWIPPADTGGRKDVSYYIACKKCNSHAGVCEECGGHVRYLPRQSGLKNTSVMMVDLLAHTNYTFEIEAVNGVSDLSPGARQYVSVNVTTNQAAPSPVTNVKKGKIAKNSISLSWQEPDRPNGIILEYEIKHFEKDQETSYTIIKSKETTITAEGLKPASVYVFQIRARTAAGYGVFSRRFEFETTPVFAAIVAVGGLLPCALLPIQA

SEQ ID NO: 76 - protein, 619 aa, Artificial sequence
  A novel predicted alternative spliced variant protein product
MRGSGPRGAGHRRPPSGGGDTPITPASLAGCYSAPRRAPLWTCLLLCAALRTLLASPSNEVNLLDSRTVMGDLGWIAFPKNGWEEIGEVDENYAPIHTYQVCKVMEQNQNNWLLTSWISNEGASRIFIELKFTLRDCNSLPGGLGTCKETFNMYYFESDDQNGRNIKENQYIKIDTIAADESFTELDLGDRVMKLNTEVRDVGPLSKKGFYLAFQDVGACIALVSVRVYYKKCPSVVRHLAVFPDTITGADSSQLLEVSGSCVNHSVTDEPPKMHCSAEGEWLVPIGKCMCKAGYEEKNGTCQVCRPGFFKASPHIQSCGKCPPHSYTHEEASTSCVCEKDYFRRESDPPTMACTRPPSAPRNAISNVNETSVFLEWIPPADTGGRKDVSYYIACKKCNSHAGVCEECGGHVRYLPRQSGLKNTSVMMVDLLAHTNYTFEIEAVNGVSDLSPGARQYVSVNVTTNQAAPSPVTNVKKGKIAKNSISLSWQEPDRPNGIILEYEIKHFEKDQETSYTIIKSKETTITAEGLKPASVYVFQIRARTAAGYGVFSRRFEFETTPVFAASSDQSQIPVIAVSVTVGVILLAVVIGVLLSGSCCECGCGRASSLCAVAHPILIC

SEQ ID NO: 77 - protein, 967 aa, Artificial sequence
  A novel predicted alternative spliced variant protein product
MRGSGPRGAGHRRPPSGGGDTPITPASLAGCYSAPRRAPLWTCLLLCAALRTLLASPSNEVNLLDSRTVMGDLGWIAFPKNGWEEIGEVDENYAPIHTYQVCKVMEQNQNNWLLTSWISNEGASRIFIELKFTLRDCNSLPGGLGTCKETFNMYYFESDDQNGRNIKENQYIKIDTIAADESFTELDLGDRVMKLNTEVRDVGPLSKKGFYLAFQDVGACIALVSVRVYYKKCPSVVRHLAVFPDTITGADSSQLLEVSGSCVNHSVTDEPPKMHCSAEGEWLVPIGKCMCKAGYEEKNGTCQVCRPGFFKASPHIQSCGKCPPHSYTHEEASTSCVCEKDYFRRESDPPTMACTRPPSAPRNAISNVNETSVFLEWIPPADTGGRKDVSYYIACKKCNSHAGVCEECGGHVRYLPRQSGLKNTSVMMVDLLAHTNYTFEIEAVNGVSDLSPGARQYVSVNVTTNQAAPSPVTNVKKGKIAKNSISLSWQEPDRPNGIILEYEIKHFEKDQETSYTIIKSKETTITAEGLKPASVYVFQIRARTAAGYGVFSRRFEFETTPVFAASSDQSQIPVIAVSVTVGVILLAVVIGVLLSGSCCECGCGRASSLCAVAHPILIWRCGYSKAKQDPEEEKMHFHNGHIKLPGVRTYIDPHTYEDPNQAVHEFAKEIEASCITIERVIGAGEFGEVCSGRLKLPGKRELPVAIKTLKVGYTEKQRRDFLGEASIMGQFDHPNIIHLEGVVTKSKPVMIVTEYMENGSLDTFLKGGKIPIRWTAPEAIAFRKFTSASDVWSYGIVMWEVVSYGERPYWEMTNQDVIKAVEEGYRLPSPMDCPAALYQLMLDCWQKERNSRPKFDEIVNMLDKLIRNPSSLKTLVNASCRVSNLLAEHSPLGSGAYRSVGEWLEAIKMGRYTEIFMENGYSSMDAVAQVTLEDLRRLGVTLVGHQKKIMNSLQEMKVQLVNGMVPL

SEQ ID NO: 78 - protein, 888 aa, Artificial sequence
  A novel predicted alternative spliced variant protein product
MRGSGPRGAGHRRPPSGGGDTPITPASLAGCYSAPRRAPLWTCLLLCAALRTLLASPSNEVNLLDSRTVMGDLGWIAFPKNGWEEIGEVDENYAPIHTYQVCKVMEQNQNNWLLTSWISNEGASRIFIELKFTLRDCNSLPGGLGTCKETFNMYYFESDDQNGRNIKENQYIKIDTIAADESFTELDLGDRVMKLNTEVRDVGPLSKKGFYLAFQDVGACIALVSVRVYYKKCPSVVRHLAVFPDTITGADSSQLLEVSGSCVNHSVTDEPPKMHCSAEGEWLVPIGKCMCKAGYEEKNGTCQVCRPGFFKASPHIQSCGKCPPHSYTHEEASTSCVCEKDYFRRESDPPTMACTRPPSAPRNAISNVNETSVFLEWIPPADTGGRKDVSYYIACKKCNSHAGVCEECGGHVRYLPRQSGLKNTSVMMVDLLAHTNYTFEIEAVNGVSDLSPGARQYVSVNVTTNQAAPSPVTNVKKGKIAKNSISLSWQEPDRPNGIILEYEIKHFEKDQETSYTIIKSKETTITAEGLKPASVYVFQIRARTAAGYGVFSRRFEFETTPVFAASSDQSQIPVIAVSVTVGVILLAVVIGVLLSGSCCECGCGRASSLCAVAHPILIWRCGYSKAKQDPEEEKMHFHNGHIKLPGVRTYIDPHTYEDPNQAVHEFAKEIEASCITIERVIGAGEFGEVCSGRLKLPGKRELPVAIKTLKVGYTEKQRRDFLGEASIMGQFDHPNIIHLEGVVTKSKPVMIVTEYMENGSLDTFLKKNDGQFTVIQLVGMLRGISAGMKYLSDMGYVHRDLAARNILINSNLVCKVSDFGLSRVLEDDPEAAYTTRGGKIPIRWTAPEAIAFRKFTSASDVWSYGIVMWEVVSYGERPYWEMTNQDSI

SEQ ID NO: 79 - protein, 985 aa, Artificial sequence
  A novel predicted alternative spliced variant protein product
MRGSGPRGAGHRRPPSGGGDTPITPASLAGCYSAPRRAPLWTCLLLCAALRTLLASPSNEVNLLDSRTVMGDLGWIAFPKNGWEEIGEVDENYAPIHTYQVCKVMEQNQNNWLLTSWISNEGASRIFIELKFTLRDCNSLPGGLGTCKETFNMYYFESDDQNGRNIKENQYIKIDTIAADESFTELDLGDRVMKLNTEVRDVGPLSKKGFYLAFQDVGACIALVSVRVYYKKCPSVVRHLAVFPDTITGADSSQLLEVSGSCVNHSVTDEPPKMHCSAEGEWLVPIGKCMCKAGYEEKNGTCQVCRPGFFKASPHIQSCGKCPPHSYTHEEASTSCVCEKDYFRRESDPPTMACTRPPSAPRNAISNVNETSVFLEWIPPADTGGRKDVSYYIACKKCNSHAGVCEECGGHVRYLPRQSGLKNTSVMMVDLLAHTNYTFEIEAVNGVSDLSPGARQYVSVNVTTNQAAPSPVTNVKKGKIAKNSISLSWQEPDRPNGIILEYEIKHFEKDQETSYTIIKSKETTITAEGLKPASVYVFQIRARTAAGYGVFSRRFEFETTPVFAASSDQSQIPVIAVSVTVGVILLAVVIGVLLSGSCCECGCGRASSLCAVAHPILIWRCGYSKAKQDPEEEKMHFHNGHIKLPGVRTYIDPHTYEDPNQAVHEFAKEIEASCITIERVIGAGEFGEVCSGRLKLPGKRELPVAIKTLKVGYTEKQRRDFLGEASIMGQFDHPNIIHLEGVVTKSKPVMIVTEYMENGSLDTFLKKNDGQFTVIQLVGMLRGISAGMKYLSDMGYVHRDLAARNILINSNLVCKVSDFGLSRVLEDDPEAAYTTRGGKIPIRWTAPEAIAFRKFTSASDVWSYGIVMWEVVSYGERPYWEMTNQDVIKAVEEGYRLPSPMDCPAALYQLMLDCWQKERNSRPKFDEIVNMLDKLIRNPSSLKTLVNASCRDLRRLGVTLVGHQKKIMNSLQEMKVQLVNGMVPL

SEQ ID NO: 80 - protein, 599 aa, Artificial sequence
  A novel predicted alternative spliced variant protein product
MVFQTRYPSWIILCYIWLLRFAHTGEAQAAKEVLLLDSKAQQTELEWISSPPNGWEEISGLDENYTPIRTYQVCQVMEPNQNNWLRTNWISKGNAQRIFVELKFTLRDCNSLPGVLGTCKETFNLYYYETDYDTGRNIRENLYVKIDTIAADESFTQGDLGERKMKLNTEVREIGPLSKKGFYLAFQDVGACIALVSVKVYYKKCWSIIENLAIFPDTVTGSEFSSLVEVRGTCVSSAEEEAENAPRMHCSAEGEWLVPIGKCICKAGYQQKGDTCEPCGRGFYKSSSQDLQCSRCPTHSFSDKEGSSRCECEDGYYRAPSDPPYVACTRPPSAPQNLIFNINQTTVSLEWSPPADNGGRNDVTYRILCKRCSWEQGECVPCGSNIGYMPQQTGLEDNYVTVMDLLAHANYTFEVEAVNGVSDLSRSQRLFAAVSITTGQAAPSQVSGVMKERVLQRSVELSWQEPEHPNGVITEYEIKYYEKDQRERTYSTVKTKSTSASINNLKPGTVYVFQIRAFTAAGYGNYSPRLDVATLEEATGKMFEATAVSSEQNPVIIIAVVAVAGTIILVFMVFGFIIGRRHCGYSKADQEGDEELYFH

SEQ ID NO: 81 - protein, 855 aa, Artificial sequence
  A novel predicted alternative spliced variant protein product
MVFQTRYPSWIILCYIWLLRFAHTGEAQAAKEVLLLDSKAQQTELEWISSPPNGWEEISGLDENYTPIRTYQVCQVMEPNQNNWLRTNWISKGNAQRIFVELKFTLRDCNSLPGVLGTCKETFNLYYYETDYDTGRNIRENLYVKIDTIAADESFTQGDLGERKMKLNTEVREIGPLSKKGFYLAFQDVGACIALVSVKVYYKKCWSIIENLAIFPDTVTGSEFSSLVEVRGTCVSSAEEEAENAPRMHCSAEGEWLVPIGKCICKAGYQQKGDTCEPCGRGFYKSSSQDLQCSRCPTHSFSDKEGSSRCECEDGYYRAPSDPPYVACTRPPSAPQNLIFNINQTTVSLEWSPPADNGGRNDVTYRILCKRCSWEQGECVPCGSNIGYMPQQTGLEDNYVTVMDLLAHANYTFEVEAVNGVSDLSRSQRLFAAVSITTGQAAPSQVSGVMKERVLQRSVELSWQEPEHPNGVITEYEIKYYEKDQRERTYSTVKTKSTSASINNLKPGTVYVFQIRAFTAAGYGNYSPRLDVATLEEATGKMFEATAVSSEQNPVIIIAVVAVAGTIILVFMVFGFIIGRRHCGYSKADQEGDEELYFHFKFPGTKTYIDPETYEDPNRAVHQFAKELDASCIKIERVIGAGEFGEVCSGRLKLPGKRDVAVAIKTLKVGYTEKQRRDFLCEASIMGQFDHPNVVHLEGVVTRGKPVMIVIEFMENGALDAFLRKHDGQFTVIQLVGMLRGIAAGMRYLADMGYVHRDLAARNILVNSNLVCKVSDFGLSRVIEDDPEAVYTTTGGKIPVRWTAPEAIQYRKFTSASDVWSYGIVMWEVMSYGERPYWDMSNQDANKPSSGSKHS

SEQ ID NO: 82 - protein, 435 aa, Artificial sequence
  A novel predicted alternative spliced variant protein product
MALDYLLLLLLASAVAAMEETLMDTRTATAELGWTANPASGWEEVSGYDENLNTIRTYQVCNVFEPNQNNWLLTTFINRRGAHRIYTEMRFTVRDCSSLPNVPGSCKETFNLYYYETDSVIATKKSAFWSEAPYLKVDTIAADESFSQVDFGGRLMKVNTEVRSFGPLTRNGFYLAFQDYGACMSLLSVRVFFKKCPSIVQNFAVFPETMTGAESTSLVIARGTCIPNAEEVDVPIKLYCNGDGEWMVPIGRCTCKPGYEPENSVACKACPAGTFKASQEAEGCSHCPSNSRSPAEASPICTCRTGYYRADFDPPEVACTSVPSGPRNVISIVNETSIILEWHPPRETGGRDDVTYNIICKKCRADRRSCSRCDDNVEFVPRQLGLTECRVSISSLWAHTPYTFDIQAINGVSSKSPFPPQHVSVNITTNQAGTG

SEQ ID NO: 83 - protein, 560 aa, Artificial sequence
  A novel predicted alternative spliced variant protein product
MALDYLLLLLLASAVAAMEETLMDTRTATAELGWTANPASGWEEVSGYDENLNTIRTYQVCNVFEPNQNNWLLTTFINRRGAHRIYTEMRFTVRDCSSLPNVPGSCKETFNLYYYETDSVIATKKSAFWSEAPYLKVDTIAADESFSQVDFGGRLMKVNTEVRSFGPLTRNGFYLAFQDYGACMSLLSVRVFFKKCPSIVQNFAVFPETMTGAESTSLVIARGTCIPNAEEVDVPIKLYCNGDGEWMVPIGRCTCKPGYEPENSVACKACPAGTFKASQEAEGCSHCPSNSRSPAEASPICTCRTGYYRADFDPPEVACTSVPSGPRNVISIVNETSIILEWHPPRETGGRDDVTYNIICKKCRADRRSCSRCDDNVEFVPRQLGLTECRVSISSLWAHTPYTFDIQAINGVSSKSPFPPQHVSVNITTNQAAPSTVPIMHQVSATMRSITLSWPQPEQPNGIILDYEIRYYEKEHNEFNSSMARSQTNTARIDGLRPGMVYVVQVRARTVAGYGKFSGKMCFQTLTDGNGLIAKRLCTAISSSITAQAEGSLEKCTRGV

SEQ ID NO: 84 - protein, 943 aa, Artificial sequence
  A novel predicted alternative spliced variant protein product
MALDYLLLLLLASAVAAMEETLMDTRTATAELGWTANPASGWEEVSGYDENLNTIRTYQVCNVFEPNQNNWLLTTFINRRGAHRIYTEMRFTVRDCSSLPNVPGSCKETFNLYYYETDSVIATKKSAFWSEAPYLKVDTIAADESFSQVDFGGRLMKVNTEVRSFGPLTRNGFYLAFQDYGACMSLLSVRVFFKKCPSIVQNFAVFPETMTGAESTSLVIARGTCIPNAEEVDVPIKLYCNGDGEWMVPIGRCTCKPGYEPENSVACKACPAGTFKASQEAEGCSHCPSNSRSPAEASPICTCRTGYYRADFDPPEVACTSVPSGPRNVISIVNETSIILEWHPPRETGGRDDVTYNIICKKCRADRRSCSRCDDNVEFVPRQLGLTECRVSISSLWAHTPYTFDIQAINGVSSKSPFPPQHVSVNITTNQAAPSTVPIMHQVSATMRSITLSWPQPEQPNGIILDYEIRYYEKEHNEFNSSMARSQTNTARIDGLRPGMVYVVQVRARTVAGYGKFSGKMCFQTLTDDDYKSELREQLPLIAGSAAAGVVFVVSLVAISIVCSRKRAYSKEAVYSDKLQHYSTGRGEFGEVYKGRLKLPGKREIYVAIKTLKAGYSEKQRRDFLSEASIMGQFDHPNIIRLEGVVTKSRPVMIITEFMENGALDSFLRQNDGQFTVIQLVGMLRGIAAGMKYLAEMNYVHRDLAARNILVNSNLVCKVSDFGLSRYLQDDTSDPTYTSSLGGKIPVRWTAPEAIAYRKFTSASDVWSYGIVMWEVMSFGERPYWDMSNQDVINAIEQDYRLPPPMDCPAALHQLMLDCWQKDRNSRPRFAEIVNTLDKMIRNPASLKTVATITAVPSQPLLDRSIPDFTAFTTVDDWLSAIKMVQYRDSFLTAGFTSLQLVTQMTSEDLLRIGITLAGHQKKILNSIHSMRVQISQSPTAMA

SEQ ID NO: 85 - protein, 223 aa, Artificial sequence
  A novel predicted alternative spliced variant protein product
MRILKRFLACIQLLCVCRLDWANGYYRQQRKLVEEIGWSYTGALNQKNWGKKYPTCNSPKQSPINIDEDLTQVNVNLKKLKFQGWDKTSLENTFIHNTGKTVEINLTNDYRVSGGVSEMVFKASKITFHWGKCNMSSDGSEHSLEGQKFPLEMQIYCFDADRFSSFEEAVKGKGKLRALSILFEVGTEENLDFKAIIDGVESVSRFVGCFCEVLTCNNLVMSC

SEQ ID NO: 86 - protein, 421 aa, Artificial sequence
  A novel predicted alternative spliced variant protein product
MRILKRFLACIQLLCVCRLDWANGYYRQQRKLVEEIGWSYTGALNQKNWGKKYPTCNSPKQSPINIDEDLTQVNVNLKKLKFQGWDKTSLENTFIHNTGKTVEINLTNDYRVSGGVSEMVFKASKITFHWGKCNMSSDGSEHSLEGQKFPLEMQIYCFDADRFSSFEEAVKGKGKLRALSILFEVGTEENLDFKAIIDGVESVSRFGKQAALDPFILLNLLPNSTDKYYIYNGSLTSPPCTDTVDWIVFKDTVSISESQLAVFCEVLTMQQSGYVMLMDYLQNNFREQQYKFSRQVFSSYTGKEEIHEAVCSSEPENVQADPENYTSLLVTWERPRVVYDTMIEKFAVLYQQLDGEDQTKHEFLTDGYQDLGAILNNLLPNMSYVLQIVAICTNGLYGKYSDQLIVDMPTDNPGGGRGKRH

SEQ ID NO: 87 - protein, 1623 aa, Artificial sequence
  A novel predicted alternative spliced variant protein product
MRILKRFLACIQLLCVCRLDWANGYYRQQRKLVEEIGWSYTGALNQKNWGKKYPTCNSPKQSPINIDEDLTQVNVNLKKLKFQGWDKTSLENTFIHNTGKTVEINLTNDYRVSGGVSEMVFKASKITFHWGKCNMSSDGSEHSLEGQKFPLEMQIYCFDADRFSSFEEAVKGKGKLRALSILFEVGTEENLDFKAIIDGVESVSRFGKQAALDPFILLNLLPNSTDKYYIYNGSLTSPPCTDTVDWIVFKDTVSISESQLAVFCEVLTMQQSGYVMLMDYLQNNFREQQYKFSRQVFSSYTGKEEIHEAVCSSEPENVQADPENYTSLLVTWERPRVVYDTMIEKFAVLYQQLDGEDQTKHEFLTDGYQDLGAILNNLLPNMSYVLQIVAICTNGLYGKYSDQLIVDMPTDNPELDLFPELIGTEEIIKEEEEGKDIEEGAIVNPGRDSATNQIRKKEPQISTTTHYNRIGTKYNEAKTNRSPTRGSEFSGKGDVPNTSLNSTSQPVTKLATEKDISLTSQTVTELPPHTVEGTSASLNDGSKTVLRSPHMNLSGTAESLNTVSITEYEEESLLTSFKLDTGAEDSSGSSPATSAIPFISENISQGYIFSSENPETITYDVLIPESARNASEDSTSSGSEESLKDPSMEGNVWFPSSTDITAQPDVGSGRESFLQTNYTEIRVDESEKTTKSFSAGPVMSQGPSVTDLEMPHYSTFAYFPTEVTPHAFTPSSRQQDLVSTVNVVYSQTTQPVYNGETPLQPSYSSEVFPLVTPLLLDNQILNTTPAASSSDSALHATPVFPSVDVSFESILSSYDGAPLLPFSSASFSSELFRHLHTVSQILPQVTSATESDKVPLHASLPVAGGDLLLEPSLAQYSDVLSTTHAASETLEFGSESGVLYKTLMFSQVEPPSSDAMMHARSSGPEPSYALSDNEGSQHIFTVSYSSAIPVHDSVGVTYQGSLFSGPSHIPIPKSSLITPTASLLQPTHALSGDGEWSGASSDSEFLLPDTDGLTALNISSPVSVAEFTYTTSVFGDDNKALSKSEIIYGNETELQIPSFNEMVYPSESTVMPNMYDNVNKLNASLQETSVSISSTKGMFPGSLAHTTTKVFDHEISQVPENNFSVQPTHTVSQASGDTSLKPVLSANSEPASSDPASSEMLSPSTQLLFYETSASFSTEVLLQPSFQASDVDTLLKTVLPAVPSDPILVETPKVDKISSTMLHLIVSNSASSENMLHSTSVPVFDVSPTSHMHSASLQGLTISYASEKYEPVLLKSESSHQVVPSLYSNDELFQTANLEINQAHPPKGRHVFATPVLSIDEPLNTLINKLIHSDEILTSTKSSVTGKVFAGIPTVASDTFVSTDHSVPIGNGHVAITAVSPHRDGSVTSTKLLFPSKATSELSHSAKSDAGLVGGGEDGDTDDDGDDDDDRDSDGLSIHKCMSCSSYRESQEKVMNDSDTHENSLMDQNNPISYSLSENSEEDNRVTSVSSDSQTGMDRSPGKSPSANGLSQKHNDGKEENDIQTGSALLPLSPESKAWAVLTSDEESGSGQGTSDSLNENETSTDFSFADTNEKDADGILAAGDSEITPGFPQSPTSSVTSENSEVFHVSEAGNASRLHTFT

SEQ ID NO: 88 - protein, 1725 aa, Artificial sequence
  A novel predicted alternative spliced variant protein product
MRILKRFLACIQLLCVCRLDWANGYYRQQRKLVEEIGWSYTGALNQKNWGKKYPTCNSPKQSPINIDEDLTQVNVNLKKLKFQGWDKTSLENTFIHNTGKTVEINLTNDYRVSGGVSEMVFKASKITFHWGKCNMSSDGSEHSLEGQKFPLEMQIYCFDADRFSSFEEAVKGKGKLRALSILFEVGTEENLDFKAIIDGVESVSRFGKQAALDPFILLNLLPNSTDKYYIYNGSLTSPPCTDTVDWIVFKDTVSISESQLAVFCEVLTMQQSGYVMLMDYLQNNFREQQYKFSRQVFSSYTGKEEIHEAVCSSEPENVQADPENYTSLLVTWERPRVVYDTMIEKFAVLYQQLDGEDQTKHEFLTDGYQDLGAILNNLLPNMSYVLQIVAICTNGLYGKYSDQLIVDMPTDNPELDLFPELIGTEEIIKEEEEGKDIEEGAIVNPGRDSATNQIRKKEPQISTTTHYNRIGTKYNEAKTNRSPTRGSEFSGKGDVPNTSLNSTSQPVTKLATEKDISLTSQTVTELPPHTVEGTSASLNDGSKTVLRSPHMNLSGTAESLNTVSITEYEEESLLTSFKLDTGAEDSSGSSPATSAIPFISENISQGYIFSSENPETITYDVLIPESARNASEDSTSSGSEESLKDPSMEGNVWFPSSTDITAQPDVGSGRESFLQTNYTEIRVDESEKTTKSFSAGPVMSQGPSVTDLEMPHYSTFAYFPTEVTPHAFTPSSRQQDLVSTVNVVYSQTTQPVYNGETPLQPSYSSEVFPLVTPLLLDNQILNTTPAASSSDSALHATPVFPSVDVSFESILSSYDGAPLLPFSSASFSSELFRHLHTVSQILPQVTSATESDKVPLHASLPVAGGDLLLEPSLAQYSDVLSTTHAASETLEFGSESGVLYKTLMFSQVEPPSSDAMMHARSSGPEPSYALSDNEGSQHIFTVSYSSAIPVHDSVGVTYQGSLFSGPSHIPIPKSSLITPTASLLQPTHALSGDGEWSGASSDSEFLLPDTDGLTALNISSPVSVAEFTYTTSVFGDDNKALSKSEIIYGNETELQIPSFNEMVYPSESTVMPNMYDNVNKLNASLQETSVSISSTKGMFPGSLAHTTTKVFDHEISQVPENNFSVQPTHTVSQASGDTSLKPVLSANSEPASSDPASSEMLSPSTQLLFYETSASFSTEVLLQPSFQASDVDTLLKTVLPAVPSDPILVETPKVDKISSTMLHLIVSNSASSENMLHSTSVPVFDVSPTSHMHSASLQGLTISYASEKYEPVLLKSESSHQVVPSLYSNDELFQTANLEINQAHPPKGRHVFATPVLSIDEPLNTLINKLIHSDEILTSTKSSVTGKVFAGIPTVASDTFVSTDHSVPIGNGHVAITAVSPHRDGSVTSTKLLFPSKATSELSHSAKSDAGLVGGGEDGDTDDDGDDDDDRDSDGLSIHKCMSCSSYRESQEKVMNDSDTHENSLMDQNNPISYSLSENSEEDNRVTSVSSDSQTGMDRSPGKSPSANGLSQKHNDGKEENDIQTGSALLPLSPESKAWAVLTSDEESGSGQGTSDSLNENETSTDFSFADTNEKDADGILAAGDSEITPGFPQSPTSSVTSENSEVFHVSEAEASNSSHESRIGLAEGLESEKKAVIPLVIVSALTFICLVVLVGILIYWRKCFQTAHFYLEDSTSPRVISTPPTPIFPISDTEEVLPGLRYYDEQLQPPEQQAQESIHKYRCL

SEQ ID NO: 89 - protein, 2307 aa, Artificial sequence
  A novel predicted alternative spliced variant protein product
MRILKRFLACIQLLCVCRLDWANGYYRQQRKLVEEIGWSYTGALNQKNWGKKYPTCNSPKQSPINIDEDLTQVNVNLKKLKFQGWDKTSLENTFIHNTGKTVEINLTNDYRVSGGVSEMVFKASKITFHWGKCNMSSDGSEHSLEGQKFPLEMQIYCFDADRFSSFEEAVKGKGKLRALSILFEVGTEENLDFKAIIDGVESVSRFGKQAALDPFILLNLLPNSTDKYYIYNGSLTSPPCTDTVDWIVFKDTVSISESQLAVFCEVLTMQQSGYVMLMDYLQNNFREQQYKFSRQVFSSYTGKEEIHEAVCSSEPENVQADPENYTSLLVTWERPRVVYDTMIEKFAVLYQQLDGEDQTKHEFLTDGYQDLGAILNNLLPNMSYVLQIVAICTNGLYGKYSDQLIVDMPTDNPELDLFPELIGTEEIIKEEEEGKDIEEGAIVNPGRDSATNQIRKKEPQISTTTHYNRIGTKYNEAKTNRSPTRGSEFSGKGDVPNTSLNSTSQPVTKLATEKDISLTSQTVTELPPHTVEGTSASLNDGSKTVLRSPHMNLSGTAESLNTVSITEYEEESLLTSFKLDTGAEDSSGSSPATSAIPFISENISQGYIFSSENPETITYDVLIPESARNASEDSTSSGSEESLKDPSMEGNVWFPSSTDITAQPDVGSGRESFLQTNYTEIRVDESEKTTKSFSAGPVMSQGPSVTDLEMPHYSTFAYFPTEVTPHAFTPSSRQQDLVSTVNVVYSQTTQPVYNGETPLQPSYSSEVFPLVTPLLLDNQILNTTPAASSSDSALHATPVFPSVDVSFESILSSYDGAPLLPFSSASFSSELFRHLHTVSQILPQVTSATESDKVPLHASLPVAGGDLLLEPSLAQYSDVLSTTHAASETLEFGSESGVLYKTLMFSQVEPPSSDAMMHARSSGPEPSYALSDNEGSQHIFTVSYSSAIPVHDSVGVTYQGSLFSGPSHIPIPKSSLITPTASLLQPTHALSGDGEWSGASSDSEFLLPDTDGLTALNISSPVSVAEFTYTTSVFGDDNKALSKSEIIYGNETELQIPSFNEMVYPSESTVMPNMYDNVNKLNASLQETSVSISSTKGMFPGSLAHTTTKVFDHEISQVPENNFSVQPTHTVSQASGDTSLKPVLSANSEPASSDPASSEMLSPSTQLLFYETSASFSTEVLLQPSFQASDVDTLLKTVLPAVPSDPILVETPKVDKISSTMLHLIVSNSASSENMLHSTSVPVFDVSPTSHMHSASLQGLTISYASEKYEPVLLKSESSHQVVPSLYSNDELFQTANLEINQAHPPKGRHVFATPVLSIDEPLNTLINKLIHSDEILTSTKSSVTGKVFAGIPTVASDTFVSTDHSVPIGNGHVAITAVSPHRDGSVTSTKLLFPSKATSELSHSAKSDAGLVGGGEDGDTDDDGDDDDDRDSDGLSIHKCMSCSSYRESQEKVMNDSDTHENSLMDQNNPISYSLSENSEEDNRVTSVSSDSQTGMDRSPGKSPSANGLSQKHNDGKEENDIQTGSALLPLSPESKAWAVLTSDEESGSGQGTSDSLNENETSTDFSFADTNEKDADGILAAGDSEITPGFPQSPTSSVTSENSEVFHVSEAEASNSSHESRIGLAEGLESEKKAVIPLVIVSALTFICLVVLVGILIYWRKCFQTAHFYLEDSTSPRVISTPPTPIFPISDDVGAIPIKHFPKHVADLHASSGFTEEFEEVQSCTVDLGITADSSNHPDNKHKNRYINIVAYDHSRVKLAQLAEKDGKLTDYINANYVDGYNRPKAYIAAQGPLKSTAEDFWRMIWEHNVEVIVMITNLVEKGRRKCDQYWPADGSEEYGNFLVTQKSVQVLAYYTVRNFTLRNTKIKKGSQKGRPSGRVVTQYHYTQWPDMGVPEYSLPVLTFVRKAAYAKRHAVGPVVVHCSAGVGRTGTYIVLDSMLQQIQHEGTVNIFGFLKHIRSQRNYLVQTEEQYVFIHDTLVEAILSKETEVLDSHIHAYVNALLIPGPAGKTKLEKQFQLLSQSNIQQSDYSAALKQCNREKNRTSSIIPVERSRVGISSLSGEGTDYINASYIMGYYQSNEFIITQHPLLHTIKDFWRMIWDHNAQLVVMIPDGQNMAEDEFVYWPNKDEPINCESFKVTLMAEEHKCLSNEEKLIIQDFILEATQDDYVLEVRHFQCPKWPNPDSPISKTFELISVIKEEAANRDGPMIVHDEHGGVTAGTFCALTTLMHQLEKENSVDVYQVAKMINLMRPGVFADIEQYQFLYKVILSLVSTRQEENPSTSLDSNGAALPDGNIAESLESLV

SEQ ID NO: 90 - protein, 1976 aa, Artificial sequence
  A novel predicted alternative spliced variant protein product
MRILKRFLACIQLLCVCRLDWANGYYRQQRKLVEEIGWSYTGALNQKNWGKKYPTCNSPKQSPINIDEDLTQVNVNLKKLKFQGWDKTSLENTFIHNTGKTVEINLTNDYRVSGGVSEMVFKASKITFHWGKCNMSSDGSEHSLEGQKFPLEMQIYCFDADRFSSFEEAVKGKGKLRALSILFEVGTEENLDFKAIIDGVESVSRFGKQAALDPFILLNLLPNSTDKYYIYNGSLTSPPCTDTVDWIVFKDTVSISESQLAVFCEVLTMQQSGYVMLMDYLQNNFREQQYKFSRQVFSSYTGKEEIHEAVCSSEPENVQADPENYTSLLVTWERPRVVYDTMIEKFAVLYQQLDGEDQTKHEFLTDGYQDLGAILNNLLPNMSYVLQIVAICTNGLYGKYSDQLIVDMPTDNPELDLFPELIGTEEIIKEEEEGKDIEEGAIVNPGRDSATNQIRKKEPQISTTTHYNRIGTKYNEAKTNRSPTRGSEFSGKGDVPNTSLNSTSQPVTKLATEKDISLTSQTVTELPPHTVEGTSASLNDGSKTVLRSPHMNLSGTAESLNTVSITEYEEESLLTSFKLDTGAEDSSGSSPATSAIPFISENISQGYIFSSENPETITYDVLIPESARNASEDSTSSGSEESLKDPSMEGNVWFPSSTDITAQPDVGSGRESFLQTNYTEIRVDESEKTTKSFSAGPVMSQGPSVTDLEMPHYSTFAYFPTEVTPHAFTPSSRQQDLVSTVNVVYSQTTQPVYNGETPLQPSYSSEVFPLVTPLLLDNQILNTTPAASSSDSALHATPVFPSVDVSFESILSSYDGAPLLPFSSASFSSELFRHLHTVSQILPQVTSATESDKVPLHASLPVAGGDLLLEPSLAQYSDVLSTTHAASETLEFGSESGVLYKTLMFSQVEPPSSDAMMHARSSGPEPSYALSDNEGSQHIFTVSYSSAIPVHDSVGVTYQGSLFSGPSHIPIPKSSLITPTASLLQPTHALSGDGEWSGASSDSEFLLPDTDGLTALNISSPVSVAEFTYTTSVFGDDNKALSKSEIIYGNETELQIPSFNEMVYPSESTVMPNMYDNVNKLNASLQETSVSISSTKGMFPGSLAHTTTKVFDHEISQVPENNFSVQPTHTVSQASGDTSLKPVLSANSEPASSDPASSEMLSPSTQLLFYETSASFSTEVLLQPSFQASDVDTLLKTVLPAVPSDPILVETPKVDKISSTMLHLIVSNSASSENMLHSTSVPVFDVSPTSHMHSASLQGLTISYASEKYEPVLLKSESSHQVVPSLYSNDELFQTANLEINQAHPPKGRHVFATPVLSIDEPLNTLINKLIHSDEILTSTKSSVTGKVFAGIPTVASDTFVSTDHSVPIGNGHVAITAVSPHRDGSVTSTKLLFPSKATSELSHSAKSDAGLVGGGEDGDTDDDGDDDDDRDSDGLSIHKCMSCSSYRESQEKVMNDSDTHENSLMDQNNPISYSLSENSEEDNRVTSVSSDSQTGMDRSPGKSPSANGLSQKHNDGKEENDIQTGSALLPLSPESKAWAVLTSDEESGSGQGTSDSLNENETSTDFSFADTNEKDADGILAAGDSEITPGFPQSPTSSVTSENSEVFHVSEAEASNSSHESRIGLAEGLESEKKAVIPLVIVSALTFICLVVLVGILIYWRKCFQTAHFYLEDSTSPRVISTPPTPIFPISDDVGAIPIKHFPKHVADLHASSGFTEEFETLKEFYQEVQSCTVDLGITADSSNHPDNKHKNRYINIVAYDHSRVKLAQLAEKDGKLTDYINANYVDGYNRPKAYIAAQGPLKSTAEDFWRMIWEHNVEVIVMITNLVEKGRRKCDQYWPADGSEEYGNFLVTQKSVQVLAYYTVRNFTLRNTKIKKGSQKGRPSGRVVTQYHYTQWPDMGVPEYSLPVLTFVRKAAYAKRHAVGPVVVHCRSNMSSFMIHWLRPYLVKKLRCWTVIFMPMLMHSSFLDQQAKQS

SEQ ID NO: 91 - protein, 1758 aa, Artificial sequence
  A novel predicted alternative spliced variant protein product
MLSHGAGLALWITLSLLQTGLAEPERCNFTLAESKASSHSVSIQWRILGSPCNFSLIYSSDTLGAALCPTFRIDNTTYGCNLQDLQAGTIYNFKIISLDEERTVVLQTDPLPPARFGVSKEKTTSTGLHVWWTPSSGKVTSYEVQLFDENNQKIQGVQIQESTSWNEYTFFNLTAGSKYNIAITAVSGGKRSFSVYTNGSTVPSPVKDIGISTKANSLLISWSHGSGNVERYRLMLMDKGILVHGGVVDKHATSYAFHGLSPGYLYNLTVMTEAAGLQNYRWKLVRTAPMEVSNLKVTNDGSLTSLKVKWQRPPGNVDSYNITLSHKGTIKESRVLAPWITETHFKELVPGRLYQVTVSCVSGELSAQKMAVGRTFPDKVANLEANNNGRMRSLVVSWSPPAGDWEQYRILLFNDSVVLLNITVGKEETQYVMDDTGLVPGRQYEVEVIVESGNLKNSERCQGRTVPLAVLQLRVKHANETSLSIMWQTPVAEWEKYIISLADRDLLLIHKSLSKDAKEFTFTDLVPGRKYMATVTSISGDLKNSSSVKGRTVPAQVTDLHVANQGMTSSLFTNWTQAQGDVEFYQVLLIHENVVIKNESISSETSRYSFHSLKSGSLYSVVVTTVSGGISSRQVVVEGRTVPSSVSGVTVNNSGRNDYLSVSWLVAPGDVDNYEVTLSHDGKVVQSLVIAKSVRECSFSSLTPGRLYTVTITTRSGKYENHSFSQERTVPDKVQGVSVSNSARSDYLRVSWVHATGDFDHYEVTIKNKNNFIQTKSIPKSENECVFVQLVPGRLYSVTVTTKSGQYEANEQGNGRTIPEPVKDLTLRNRSTEDLHVTWSGANGDVDQYEIQLLFNDMKVFPPFHLVNTATEYRFTSLTPGRQYKILVLTISGDVQQSAFIEGFTVPSAVKNIHISPNGATDSLTVNWTPGGGDVDSYTVSAFRHSQKVDSQTIPKHVFEHTFHRLEAGEQYQIMIASVSGSLKNQINVVGRTVPASVQGVIADNAYSSYSLIVSWQKAAGVAERYDILLLTENGILLRNTSEPATTKQHKFEDLTPGKKYKIQILTVSGGLFSKEAQTEGRTVPAAVTDLRITENSTRHLSFRWTASEGELSWYNIFLYNPDGNLQERAQVDPLVQSFSFQNLLQGRMYKMVIVTHSGELSNESFIFGRTVPASVSHLRGSNRNTTDSLWFNWSPASGDFDFYELILYNPNGTKKENWKDKDLTEWRFQGLVPGRKYVLWVVTHSGDLSNKVTAESRTAPSPPSLMSFADIANTSLAITWKGPPDWTDYNDFELQWLPRDALTVFNPYNNRKSEGRIVYGLRPGRSYQFNVKTVSGDSWKTYSKPIFGSVRTKPDKIQNLHCRPQNSTAIACSWIPPDSDFDGYSIECRKMDTQEVEFSRKLEKEKSLLNIMMLVPHKRYLVSIKVQSAGMTSEVVEDSTITMIDRPPPPPPHIRVNEKDVLISKSSINFTVNCSWFSDTNGAVKYFTVVVREADGSDELKPEQQHPLPSYLEYRHNASIRVYQTNYFASKCAENPNSNSKSFNIKLGAEMESLGGKRDPTQQKFCDGPLKPHTAYRISIRAFTQLFDEDLKEFTKPLYSDTFFSLPITTESEPLFGAIEGVSAGLFLIGMLVAVVALLICRQKVSHGRERPSARLSIRRDRPLSVHLNLGQKGNRKTSCPIKINQFEGHFMKLQADSNYLLSKEYEELKDVGRNQSCDIALLPENRGKNRYNNILPWQQLQKRIHCHSGTASWHQG

SEQ ID NO: 92 - protein, 286 aa, Artificial sequence
  A novel predicted alternative spliced variant protein product
MKKTQTWILTCIYLQLLLFNPLVKTEGICRNRVTNNVKDVTKLVANLPKDYMITLKYVPGMDVLPSHCWISEMVVQLSDSLTDLLDKFSNISEGLSNYSIIDKLVNIVDDLVECVKENSSKDLKKSFKSPEPRLFTPEEFFRIFNRSIDAFKDFVVASETSDCVVSSTLSPEKDSRVSVTKPFMLPPVAASSLRNDSSSSNRKAKNPPGDSSLHWAAMALPALFSLIIGFAFGALYWKYVARERERVSRSVIVACINTVTFVHWLVTVHVCFINEAALNKFIFCLE

SEQ ID NO: 93 - protein, 423 aa, Artificial sequence
  A novel predicted alternative spliced variant protein product
MRGARGAWDFLCVLLLLLRVQTGSSQPSVSPGEPSPPSIHPGKSDLIVRVGDEIRLLCTDPGFVKWTFEILDETNENKQNEWITEKAEATNTGKYTCTNKHGLSNSIYVFVRDPAKLFLVDRSLYGKEDNDTLVRCPLTDPEVTNYSLKGCQGKPLPKDLRFIPDPKAGIMIKSVKRAYHRLCLHCSVDQEGKSVLSEKFILKVRPAFKAVPVVSVSKASYLLREGEEFTVTCTIKDVSSSVYSTWKRENSQTKLQEKYNSWHHGDFNYERQATLTISSARVNDSGVFMCYANNTFGSANVTTTLEVVDKGFINIFPMINTTVFVNDGENVDLIVEYEAFPKPEHQQWIYMNRTFTDKWEDYPKSENESNIRYVSELHLTRLKGTEGGTYTFLVSNSDVNAAIAFNVYVNNALLLYCQWMCRH

SEQ ID NO: 94 - protein, 673 aa, Artificial sequence
  A novel predicted alternative spliced variant protein product
MRGARGAWDFLCVLLLLLRVQTGSSQPSVSPGEPSPPSIHPGKSDLIVRVGDEIRLLCTDPGFVKWTFEILDETNENKQNEWITEKAEATNTGKYTCTNKHGLSNSIYVFVRDPAKLFLVDRSLYGKEDNDTLVRCPLTDPEVTNYSLKGCQGKPLPKDLRFIPDPKAGIMIKSVKRAYHRLCLHCSVDQEGKSVLSEKFILKVRPAFKAVPVVSVSKASYLLREGEEFTVTCTIKDVSSSVYSTWKRENSQTKLQEKYNSWHHGDFNYERQATLTISSARVNDSGVFMCYANNTFGSANVTTTLEVVDKGFINIFPMINTTVFVNDGENVDLIVEYEAFPKPEHQQWIYMNRTFTDKWEDYPKSENESNIRYVSELHLTRLKGTEGGTYTFLVSNSDVNAAIAFNVYVNTKPEILTYDRLVNGMLQCVAAGFPEPTIDWYFCPGTEQRCSASVLPVDVQTLNSSGPPFGKLVVQSSIDSSAFKHNGTVECKAYNDVGKTSAYFNFAFKGNNKEQIHPHTLFTPLLIGFVIVAGMMCIIVMILTYKYLQKPMYEVQWKVVEEINGNNYVYIDPTQLPYDHKWEFPRNRLSFGKTLGAGAFGKVVEATAYGLIKSDAAMTVAVKMLKPSAHLTEREALMSELKVLSYLGNHMNIVNLLGACTIGAAIVLMSTWT

SEQ ID NO: 95 - protein, 225 aa, Artificial sequence
  A novel predicted alternative spliced variant protein product
MELAALCRWGLLLALLPPGAASTQVCTGTDMKLRLPASPETHLDMLRHLYQGCQVVQGNLELTYLPTNASLSFLQDIQEVQGYVLIAHNQVRQVPLQRLRIVRGTQLFEDNYALAVLDNGDPLNNTTPVTGASPGGLRELQLRSLTEILKGGVLIQRNPQLCYQDTILWKDIFHKNNQLALTLIDTNRSRACHPCSPMCKGSRCWGESSEDCQSRLPPLQPQWHL

SEQ ID NO: 96 - protein, 1300 aa, Artificial sequence
  A novel predicted alternative spliced variant protein product
MRANDALQVLGLLFSLARGSEVGNSQAVCPGTLNGLSVTGDAENQYQTLYKLYERCEVVMGNLEIVLTGHNADLSFLQWIREVTGYVLVAMNEFSTLPLPNLRVVRGTQVYDGKFAIFVMLNYNTNSSHALRQLRLTQLTGPPCHEVCKGRCWGPGSEDCQTLTKTICAPQCNGHCFGPNPNQCCHDECAGGCSGPQDTDCFACRHFNDSGACVPRCPQPLVYNKLTFQLEPNPHTKYQYGGVCVASCPHNFVVDQTSCVRACPPDKMEVDKNGLKMCEPCGGLCPKACEGTGSGSRFQTVDSSNIDGFVNCTKILGNLDFLITGLNGDPWHKIPALDPEKLNVFRTVREITGYLNIQSWPPHMHNFSVFSNLTTIGGRSLYNRGFSLLIMKNLNVTSLGFRSLKEISAGRIYISANRQLCYHHSLNWTKVLRGPTEERLDIKHNRPRRDCVAEGKVCDPLCSSGGCWGPGPGQCLSCRNYSRGGVCVTHCNFLNGEPREFAHEAECFSCHPECQPMEGTATCNGSGSDTCAQCAHFRDGPHCVSSCPHGVLGAKGPIYKYPDVQNECRPCHENCTQGCKGPELQDCLGQTLVLIGKTHLTMALTVIAGLVVIFMMLGGTFLYWRGRRIQNKRAMRRYLERGESIEPLDPSEKANKVLARIFKETELRKLKVLGSGVFGTVHKGVWIPEGESIKIPVCIKVIEDKSGRQSFQAVTDHMLAIGSLDHAHIVRLLGLCPGSSLQLVTQYLPLGSLLDHVRQHRGALGPQLLLNWGVQIAKGMYYLEEHGMVHRNLAARNVLLKSPSQVQVADFGVADLLPPDDKQLLYSEAKTPIKWMALESIHFGKYTHQSDVWSYGVTVWELMTFGAEPYAGLRLAEVPDLLEKGERLAQPQICTIDVYMVMVKCWMIDENIRPTFKELANEFTRMARDPPRYLVIKRESGPGIAPGPEPHGLTNKKLEEVELEPELDLDLDLEAEEDNLATTTLGSALSLPVGTLNRPRGSQSLLSPSSGYMPMNQGNLGESCQESAVSGSSERCPRPVSLHPMPRGCLASESSEGHVTGSEAELQEKVSMCRSRSRSRSPRPRGDSAYHSQRHSLLTPVTPLSPPGLEEEDVNGYVMPDTHLKGTPSSREGTLSSVGLSSVLGTEEEDEDEEYEYMNRRRRHSPPHPPRPSSLEELGYEYMDVGSDLSASLGSTQSCPLHPVPIMPTAGTTPDEDYEYMNRQRDGGGPGGDYAAMGACPASEQGYEEMRAFQGPGHQAPHVHYARLKTLRSLEATDSAFDNPDYWHSRLFPKANAQRT

SEQ ID NO: 97 - protein, 569 aa, Artificial sequence
  A novel predicted alternative spliced variant protein product
MRANDALQVLGLLFSLARGSEVGNSQAVCPGTLNGLSVTGDAENQYQTLYKLYERCEVVMGNLEIVLTGHNADLSFLQWIREVTGYVLVAMNEFSTLPLPNLRVVRGTQVYDGKFAIFVMLNYNTNSSHALRQLRLTQLTEILSGGVYIEKNDKLCHMDTIDWRDIVRDRDAEIVVKDNGRSCPPCHEVCKGRCWGPGSEDCQTLTKTICAPQCNGHCFGPNPNQCCHDECAGGCSGPQDTDCFACRHFNDSGACVPRCPQPLVYNKLTFQLEPNPHTKYQYGGVCVASCPHNFVVDQTSCVRACPPDKMEVDKNGLKMCEPCGGLCPKACEGTGSGSRFQTVDSSNIDGFVNCTKILGNLDFLITGLNGDPWHKIPALDPEKLNVFRTVREITGYLNIQSWPPHMHNFSVFSNLTTIGGRSLYNRGFSLLIMKNLNVTSLGFRSLKEISAGRIYISANRQLCYHHSLNWTKVLRGPTEERLDIKHNRPRRDCVAEGKVCDPLCSSGGCWGPGPGQCLSCRNYSRGGVCVTHCNFLNGEPREFAHEAECFSCHPECQPMEGTATCNGSV

SEQ ID NO: 98 - protein, 1302 aa, Artificial sequence
  A novel predicted alternative spliced variant protein product
MRANDALQVLGLLFSLARGSEVGNSQAVCPGTLNGLSVTGDAENQYQTLYKLYERCEVVMGNLEIVLTGHNADLSFLQWIREVTGYVLVAMNEFSTLPLPNLRVVRGTQVYDGKFAIFVMLNYNTNSSHALRQLRLTQLTEILSGGVYIEKNDKLCHMDTIDWRDIVRDRDAEIVVKDNGRSCPPCHEVCKGRCWGPGSEDCQTLTKTICAPQCNGHCFGPNPNQCCHDECAGGCSGPQDTDCFACRHFNDSGACVPRCPQPLVYNKLTFQLEPNPHTKYQYGGVCVASCPHNFVVDQTSCVRACPPDKMEVDKNGLKMCEPCGGLCPKACEGTGSGSRFQTVDSSNIDGFVNCTKILGNLDFLITGLNGDPWHKIPALDPEKLNVFRTVREITGYLNIQSWPPHMHNFSVFSNLTTIGGRSLYNRGFSLLIMKNLNVTSLGFRSLKEISAGRIYISANRQLCYHHSLNWTKVLRGPTEERLDIKHNRPRRDCVAEGKVCDPLCSSGGCWGPGPGQCLSCRNYSRGGVCVTHCNFLNGEPREFAHEAECFSCHPECQPMEGTATCNGSGSDTCAQCAHFRDGPHCVSSCPHGVLGAKGPIYKYPDVQNECRPCHENCTQGCKGPELQDCLGQTLVLIGKTHLTMALTVIAGLVVIFMMLGGTFLYWRGRRIQNKRAMRRYLERGEGVWIPEGESIKIPVCIKVIEDKSGRQSFQAVTDHMLAIGSLDHAHIVRLLGLCPGSSLQLVTQYLPLGSLLDHVRQHRGALGPQLLLNWGVQIAKGMYYLEEHGMVHRNLAARNVLLKSPSQVQVADFGVADLLPPDDKQLLYSEAKTPIKWMALESIHFGKYTHQSDVWSYGVTVWELMTFGAEPYAGLRLAEVPDLLEKGERLAQPQICTIDVYMVMVKCWMIDENIRPTFKELANEFTRMARDPPRYLVIKRESGPGIAPGPEPHGLTNKKLEEVELEPELDLDLDLEAEEDNLATTTLGSALSLPVGTLNRPRGSQSLLSPSSGYMPMNQGNLGESCQESAVSGSSERCPRPVSLHPMPRGCLASESSEGHVTGSEAELQEKVSMCRSRSRSRSPRPRGDSAYHSQRHSLLTPVTPLSPPGLEEEDVNGYVMPDTHLKGTPSSREGTLSSVGLSSVLGTEEEDEDEEYEYMNRRRRHSPPHPPRPSSLEELGYEYMDVGSDLSASLGSTQSCPLHPVPIMPTAGTTPDEDYEYMNRQRDGGGPGGDYAAMGACPASEQGYEEMRAFQGPGHQAPHVHYARLKTLRSLEATDSAFDNPDYWHSRLFPKANAQRT

SEQ ID NO: 99 - protein, 619 aa, Artificial sequence
  A novel predicted alternative spliced variant protein product
MKPATGLWVWVSLLVAAGTVQPSDSQSVCAGTENKLSSLSDLEQQYRALRKYYENCEVVMGNLEITSIEHNRDLSFLRSVREVTGYVLVALNQFRYLPLENLRIIRGTKLYEDRYALAIFLNYRKDGNFGLQELGLKNLTEILNGGVYVDQNKFLCYADTIHWQDIVRNPWPSNLTLVSTNGSSGCGRCHKSCTGRCWGPTENHCQTLTRTVCAEQCDGRCYGPYVSDCCHRECAGGCSGPKDTDCFACMNFNDSGACVTQCPQTFVYNPTTFQLEHNFNAKYTYGAFCVKKCPHNFVVDSSSCVRACPSSKMEVEENGIKMCKPCTDICPKACDGIGTGSLMSAQTVDSSNIDKFINCTKINGNLIFLVTGIHGDPYNAIEAIDPEKLNVFRTVREITGFLNIQSWPPNMTDFSVFSNLVTIGGRVLYSGLSLLILKQQGITSLQFQSLKEISAGNIYITDNSNLCYYHTINWTTLFSTINQRIVIRDNRKAENCTAEGMVCNHLCSSDGCWGPGPDQCLSCRRFSRGRICIESCNLYDGVLTTVQSALILKMAQTVWKNVQMAYRGQTVSFSSMLIQIGSATHAIQTAPKGVTVPLVMTAFTHGRAIPLYHNMLELP

SEQ ID NO: 100 - protein, 1283 aa, Artificial sequence
  A novel predicted alternative spliced variant protein product
MKPATGLWVWVSLLVAAGTVQPSDSQSVCAGTENKLSSLSDLEQQYRALRKYYENCEVVMGNLEITSIEHNRDLSFLRSVREVTGYVLVALNQFRYLPLENLRIIRGTKLYEDRYALAIFLNYRKDGNFGLQELGLKNLTEILNGGVYVDQNKFLCYADTIHWQDIVRNPWPSNLTLVSTNGSSGCGRCHKSCTGRCWGPTENHCQTLTRTVCAEQCDGRCYGPYVSDCCHRECAGGCSGPKDTDCFACMNFNDSGACVTQCPQTFVYNPTTFQLEHNFNAKYTYGAFCVKKCPHNFVVDSSSCVRACPSSKMEVEENGIKMCKPCTDICPKACDGIGTGSLMSAQTVDSSNIDKFINCTKINGNLIFLVTGIHGDPYNAIEAIDPEKLNVFRTVREITGFLNIQSWPPNMTDFSVFSNLVTIGGRVLYSGLSLLILKQQGITSLQFQSLKEISAGNIYITDNSNLCYYHTINWTTLFSTINQRIVIRDNRKAENCTAEGMVCNHLCSSDGCWGPGPDQCLSCRRFSRGRICIESCNLYDGEFREFENGSICVECDPQCEKMEDGLLTCHGPGPDNCTKCSHFKDGPNCVEKCPDGLQGANSFIFKYADPDRECHPCHPNCTQGTPLIAAGVIGGLFILVIVGLTFAVYVRRKSIKKKRALRRFLETELVEPLTPSGTAPNQAQLRILKETELKRVKVLGSGAFGTVYKGIWVPEGETVKIPVAIKILNETTGPKANVEFMDEALIMASMDHPHLVRLLGVCLSPTIQLVTQLMPHGCLLEYVHEHKDNIGSQLLLNWCVQIAKGMMYLEERRLVHRDLAARNVLVKSPNHVKITDFGLARLLEGDEKEYNADGGKMPIKWMALECIHYRKFTHQSDVWSYGVTIWELMTFGGKPYDGIPTREIPDLLEKGERLPQPPICTIDVYMVMVKCWMIDADSRPKFKELAAEFSRMARDPQRYLVIQGDDRMKLPSPNDSKFFQNLLDEEDLEDMMDAEEYLVPQAFNIPPPIYTSRARIDSNRSEIGHSPPPAYTPMSGNQFVYRDGGFAAEQGVSVPYRAPTSTIPEAPVAQGATAEIFDDSCCNGTLRKPVAPHVQEDSSTQRYSADPTVFAPERSPRGELDEEGYMTPMRDKPKQEYLNPVEENPFVSRRKNGDLQALDNPEYHNASNGPPKAEDEYVNEPLYLNTFANTLGKAEYLKNNILSMPEKAKKAFDNPDYWNHSLPPRSTLQHPDYLQEYSTKYFYKQNGRIRPIVAENPEYLSEFSLKPGTVLPPPPYRHRNTVV

SEQ ID NO: 101 - protein, 623 aa, Artificial sequence
  A novel predicted alternative spliced variant protein product
MSERKEGRGKGKGKKKERGSGKKPESAAGSQSPALPPRLKEMKSQESAAGSKLVLRCETSSEYSSLRFKWFKNGNELNRKNKPQNIKIQKKPGKSELRINKASLADSGEYMCKVISKLGNDSASANITIVESNEIITGMPASTEGAYVSSATSTSTTGTSHLVKCAEKEKTFCVNGGECFMVKDLSNPSRYLCKCQPGFTGARCTENVPMKVQNQEKAEELYQKRVLTITGICIALLVVGIMCVVAYCKTKKQRKKLHDRLRQSLRSERNNMMNIANGPHHPNPPPENVQLVNQYVSKNVISSEHIVEREAETSFSTSHYTSTAHHSTTVTQTPSHSWSNGHTESILSESHSVIVMSSVENSRHSSPTGGPRGRLNGTGGPRECNSFLRHARETPDSYRDSPHSERYVSAMTTPARMSPVDFHTPSSPKSPPSEMSPPVSSMTVSMPSMAVSPFMEEERPLLLVTPPRLREKKFDHHPQQFSSFHHNPAHDSNSLPASPLRIVEDEEYETTQEYEPAQEPVKKLANSRRAKRTKPNGHIANRLEVDSNTSSQSSNSESETEDERVGEDTPFLGIQNPLAASLEATPAFRLADSRTNPAGRFSTQEEIQARLSSVIANQDPIAV

SEQ ID NO: 102 - protein, 252 aa, Artificial sequence
  A novel predicted alternative spliced variant protein product
MSERKEGRGKGKGKKKERGSGKKPESAAGSQSPALPPRLKEMKSQESAAGSKLVLRCETSSEYSSLRFKWFKNGNELNRKNKPQNIKIQKKPGKSELRINKASLADSGEYMCKVISKLGNDSASANITIVESNEIITGMPASTEGAYVSSESPIRISVSTEGANTSSSTSTSTTGTSHLVKCAEKEKTFCVNGGECFMVKDLSNPSRYLCKGGGAVPEESADHNRHLHRPPCGRHHVCGGLLQNQETAEKAA

SEQ ID NO: 103 - protein, 628 aa, Artificial sequence
  A novel predicted alternative spliced variant protein product
MSERKEGRGKGKGKKKERGSGKKPESAAGSQSPALPPQLKEMKSQESAAGSKLVLRCETSSEYSSLRFKWFKNGNELNRKNKPQNIKIQKKPGKSELRINKASLADSGEYMCKVISKLGNDSASANITIVESNEIITGMPASTEGAYVSSATSTSTTGTSHLVKCAEKEKTFCVNGGECFMVKDLSNPSRYLCKCPNEFTGDRCQNYVMASFYKHLGIEFMEAEELYQKRVLTITGICIALLVVGIMCVVAYCKTKKQRKKLHDRLRQSLRSERNNMMNIANGPHHPNPPPENVQLVNQYVSKNVISSEHIVEREAETSFSTSHYTSTAHHSTTVTQTPSHSWSNGHTESILSESHSVIVMSSVENSRHSSPTGGPRGRLNGTGGPRECNSFLRHARETPDSYRDSPHSERYVSAMTTPARMSPVDFHTPSSPKSPPSEMSPPVSSMTVSMPSMAVSPFMEEERPLLLVTPPRLREKKFDHHPQQFSSFHHNPAHDSNSLPASPLRIVEDEEYETTQEYEPAQEPVKKLANSRRAKRTKPNGHIANRLEVDSNTSSQSSNSESETEDERVGEDTPFLGIQNPLAASLEATPAFRLADSRTNPAGRFSTQEEIQARLSSVIANQDPIAV

SEQ ID NO: 104 - protein, 252 aa, Artificial sequence
  A novel predicted alternative spliced variant protein product
MSERKEGRGKGKGKKKERGSGKKPESAAGSQSPALPPQLKEMKSQESAAGSKLVLRCETSSEYSSLRFKWFKNGNELNRKNKPQNIKIQKKPGKSELRINKASLADSGEYMCKVISKLGNDSASANITIVESNEIITGMPASTEGAYVSSESPIRISVSTEGANTSSSTSTSTTGTSHLVKCAEKEKTFCVNGGECFMVKDLSNPSRYLCKGGGAVPEESADHNRHLHRPPCGRHHVCGGLLQNQETAEKAA

SEQ ID NO: 105 - protein, 637 aa, Artificial sequence
  A novel predicted alternative spliced variant protein product
MSERKEGRGKGKGKKKERGSGKKPESAAGSQSPALPPQLKEMKSQESAAGSKLVLRCETSSEYSSLRFKWFKNGNELNRKNKPQNIKIQKKPGKSELRINKASLADSGEYMCKVISKLGNDSASANITIVESNEIITGMPASTEGAYVSSESPIRISVSTEGANTSSSTSTSTTGTSHLVKCAEKEKTFCVNGGECFMVKDLSNPSRYLCKCPNEFTGDRCQNYVMASFYKAEELYQKRVLTITGICIALLVVGIMCVVAYCKTKKQRKKLHDRLRQSLRSERNNMMNIANGPHHPNPPPENVQLVNQYVSKNVISSEHIVEREAETSFSTSHYTSTAHHSTTVTQTPSHSWSNGHTESILSESHSVIVMSSVENSRHSSPTGGPRGRLNGTGGPRECNSFLRHARETPDSYRDSPHSERYVSAMTTPARMSPVDFHTPSSPKSPPSEMSPPVSSMTVSMPSMAVSPFMEEERPLLLVTPPRLREKKFDHHPQQFSSFHHNPAHDSNSLPASPLRIVEDEEYETTQEYEPAQEPVKKLANSRRAKRTKPNGHIANRLEVDSNTSSQSSNSESETEDERVGEDTPFLGIQNPLAASLEATPAFRLADSRTNPAGRFSTQEEIQARLSSVIANQDPIAV

SEQ ID NO: 106 - protein, 260 aa, Artificial sequence [sequence omitted]

SEQ ID NO: 107 - protein, 620 aa, Artificial sequence
  A novel predicted alternative spliced variant protein product
MSERKEGRGKGKGKKKERGSGKKPESAAGSQSPALPPQLKEMKSQESAAGSKLVLRCETSSEYSSLRFKWFKNGNELNRKNKPQNIKIQKKPGKSELRINKASLADSGEYMCKVISKLGNDSASANITIVESNEIITGMPASTEGAYVSSATSTSTTGTSHLVKCAEKEKTFCVNGGECFMVKDLSNPSRYLCKCPNEFTGDRCQNYVMASFYKAEELYQKRVLTITGICIALLVVGIMCVVAYCKTKKQRKKLHDRLRQSLRSERNNMMNIANGPHHPNPPPENVQLVNQYVSKNVISSEHIVEREAETSFSTSHYTSTAHHSTTVTQTPSHSWSNGHTESILSESHSVIVMSSVENSRHSSPTGGPRGRLNGTGGPRECNSFLRHARETPDSYRDSPHSERYVSAMTTPARMSPVDFHTPSSPKSPPSEMSPPVSSMTVSKPSMAVSPFMEEERPLLLVTPPRLREKKFDHHPQQFSSFHHNPAHDSNSLPASPLRIVEDEEYETTQEYEPAQEPVKKLANSRRAKRTKPNGHIANRLEVDSNTSSQSSNSESETEDERVGEDTPFLGIQNPLAASLEATPAFRLADSRTNPAGRFSTQEEIQARLSSVIANQDPIAV

SEQ ID NO: 108 - protein, 251 aa, Artificial sequence
  A novel predicted alternative spliced variant protein product
MSERKEGRGKGKGKKKERGSGKKPESAAGSQSPALPPQLKEMKSQESAAGSKLVLRCETSSEYSSLRFKWFKNGNELNRKNKPQNIKIQKKPGKSELRINKASLADSGEYMCKVISKLGNDSASANITIVESNEIITGMPASTEGAYVSSESPIRISVSTEGANTSSSTSTSTTGTSHLVKCAEKEKTFCVNGGECFMVKDLSNPSRYLCKCPNEFTGDRCQNYVMASFYRNSGKSCMTVFGRAFGLNETI

SEQ ID NO: 109 - protein, 224 aa, Artificial sequence
  A novel predicted alternative spliced variant protein product
MSERKEGRGKGKGKKKERGSGKKPESAAGSQSPALPPQLKEMKSQESAAGSKLVLRCETSSEYSSLRFKWFKNGNELNRKNKPQNIKIQKKPGKSELRINKASLADSGEYMCKVISKLGNDSASANITIVESNEIITGMPASTEGAYVSSATSTSTTGTSHLVKCAEKEKTFCVNGGECFMVKDLSNPSRYLCKCPNEFTGDRCQNYVMASFYSTSTPFLSLPE

SEQ ID NO: 110 - protein, 194 aa, Artificial sequence
  A novel predicted alternative spliced variant protein product
MSERKEGRGKGKGKKKERGSGKKPESAAGSQSPALPPQLKEMKSQESAAGSKLVLRCETSSEYSSLRFKWFKNGNELNRKNKPQNIKIQKKPGKSELRINKASLADSGEYMCKVISKLGNDSASANITIVESNEIITGMPASTEGAYVSSATSTSTTGTSHLVKCAEKEKTFCVNGGECFMVKDLSNPSRYLCK

SEQ ID NO: 111 - protein, 224 aa, Artificial sequence
  A novel predicted alternative spliced variant protein product
MSERKEGRGKGKGKKKERGSGKKPESAAGSQSPALPPRLKEMKSQESAAGSKLVLRCETSSEYSSLRFKWFKNGNELNRKNKPQNIKIQKKPGKSELRINKASLADSGEYMCKVISKLGNDSASANITIVESNEIITGMPASTEGAYVSSATSTSTTGTSHLVKCAEKEKTFCVNGGECFMVKDLSNPSRYLCKCPNEFTGDRCQNYVMASFYSTSTPFLSLPE

SEQ ID NO: 112 - protein, 445 aa, Artificial sequence
  A novel predicted alternative spliced variant protein product
MSERKEGRGKGKGKKKERGSGKKPESAAGSQSPALPPRLKEMKSQESAAGSKLVLRCETSSEYSSLRFKWFKNGNELNRKNKPQNIKIQKKPGKSELRINKASLADSGEYMCKVISKLGNDSASANITIVESNEIITGMPASTEGAYVSSATSTSTTGTSHLVKCAEKEKTFCVNGGECFMVKDLSNPSRYLCKCQPGFTGARCTENVPMKVQNQEKAEELYQKRVLTITGICIALLVVGIMCVVAYCKTKKQRKKLHDRLRQSLRSERNNMMNIANGPHHPNPPPENVQLVNQYVSKNVISSEHIVEREAETSFSTSHYTSTAHHSTTVTQTPSHSWSNGHTESILSESHSVIVMSSVENSRHSSPTGGPRGRLNGTGGPRECNSFLRHARETPDSYRDSPHSERHNLIAELRRNKAHRSKCMQIQLSATHLRSSSIPHLGFIL

SEQ ID NO: 113 - protein, 252 aa, Artificial sequence; identical to SEQ ID NO: 102
  A novel predicted alternative spliced variant protein product

SEQ ID NO: 114 - protein, 539 aa, Artificial sequence
  A novel predicted alternative spliced variant protein product
MSERKEGRGKGKGKKKERGSGKKPESAAGSQSPALPPRLKEMKSQESAAGSKLVLRCETSSEYSSLRFKWFKNGNELNRKNKPQNIKIQKKPGKSELRINKASLADSGEYMCKVISKLGNDSASANITIVESNEIITGMPASTEGAYVSSESPIRISVSTEGANTSSSTSTSTTGTSHLVKCAEKEKTFCVNGGECFMVKDLSNPSRYLCKCQPGFTGARCTENVPMKVQNQEKAEELYQKRVLTITGICIALLVVGIMCVVAYCKTKKQRKKLHDRLRQSLRSERNNMMNIANGPHHPNPPPENVQLVNQYVSKNVISSEHIVEREAETSFSTSHYTSTAHHSTTVTQTPSHSWSNGHTESILSESHSVIVMSSVENSRHSSPTGGPRGRLNGTGGPRECNSFLRHARETPDSYRDSPHSERYVSAMTTPARMSPVDFHTPSSPKSPPSEMSPPVSSMTVSMPSMAVSPFMEEERPLLLVTPPRLREKKFDHHPQQFSSFHHNPAHDSNSLPASPLRIVEDEEYETTQEYEPAQEPVK

SEQ ID NO: 115 - protein, 1180 aa, Artificial sequence
  A novel predicted alternative spliced variant protein product
MRSPRTRGRSGRPLSLLLALLCALRAKVCGASGQFELEILSMQNVNGELQNGNCCGGARNPGDRKCTRDECDTYFKVCLKEYQSRVTAGGPCSFGSGSTPVIGGNTFNLKASRGNDRNRIVLPFSFAWPRSYTLLVEAWDSSNDTVQPDSIIEKASHSGMINPSRQWQTLKQNTGVAHFEYQIRVTCDDYYYGFGCNKFCRPRDDFFGHYACDQNGNKTCMEGWMGPECNRAICRQGCSPKHGSCKLPGDCRCQYGWQGLYCDKCIPHPGCVHGICNEPWQCLCETNWGGQLCDKDLNYCGTHQPCLNGGTCSNTGPDKYQCSCPEGYSGPNCEIAEHACLSDPCHNRGSCKETSLGFECECSPGWTGPTCSTNIDDCSPNNCSHGGTCQDLVNGFKCVCPPQWTGKTCQLDINDCLGQCQNDASCRDLVNGYRCICPPGYAGDHCERDIDECASNPCLNGGHCQNEINRFQCLCPTGFSGNLCQLDIDYCEPNPCQNGAQCYNRASDYFCKCPEDYEGKNCSHLKDHCRTTPCEVIDSCTVAMASNDTPEGVRYISSNVCGPHGKCKSQSGGKFTCDCNKGFTGTYCHENINDCESNPCRNGGTCIDGVNSYKCICSDGWEGAYCETNINDCSQNPCHNGGTCRDLVNDFYCDCKNGWKGKTCHSRDSQCDEATCNNGGTCYDEGDAFKCMCPGGWEGTTCNIARNSSCLPNPCHNGGTCVVNGESFTCVCKEGWEGPICAQNTNDCSPHPCYNSGTCVDGDNWYRCECAPGFAGPDCRININECQSSPCAFGATCVDEINGYRCVCPPGHSGAKCQEVSGRPCITMGSVIPDGAKWDDDCNTCQCLNGRIACSKVWCGPRPCLLHKGHSECPSGQSCIPILDDQCFVHPCTGVGECRSSSLQPVKTKCTSDSYYQDNCANITFTFNKEMMSPGLTTEHICSELRNLNILKNVSAEYSIYIACEPSPSANNEIHVAISAEDIRDDGNPIKEITDKIIDLVSKRDGNSSLIAAVAEVRVQRRPLKNRTDFLVPLLSSVLTVAWICCLVTAFYWCLRKRRKPGSHTHSASEDNTTNNVREQLNQIKNPIEKHGANTVPIKDYENKNSKMSKIRTHNSEVEEDDMDKHQQKARFAKQPAYTLVDREEKPPNGTPTKHPNWTNKQDNRDLESAQSLNRMEYIV

SEQ ID NO: 116 - protein, 1160 aa, Artificial sequence
  A novel predicted alternative spliced variant protein product
MRSPRTRGRSGRPLSLLLALLCALRAKVCGASGQFELEILSMQNVNGELQNGNCCGGARNPGDRKCTRDECDTYFKVCLKEYQSRVTAGGPCSFGSGSTPVIGGNTFNLKASRGNDRNRIVLPFSFAWPRSYTLLVEAWDSSNDTVQPDSIIEKASHSGMINPSRQWQTLKQNTGVAHFEYQIRVTCDDYYYGFGCNKFCRPRDDFFGHYACDQNGNKTCMEGWMGPECNRAICRQGCSPKHGSCKLPGDCRCQYGWQGLYCDKCIPHPGCVHGICNEPWQCLCETNWGGQLCDKDLNYCGTHQPCLNGGTCSNTGPDKYQCSCPEGYSGPNCEIAEHACLSDPCHNRGSCKETSLGFECECSPGWTGPTCSTNIDDCSPNNCSHGGTCQDLVNGFKCVCPPQWTGKTCQLDANECEAKPCVNAKSCKNLIASYYCDCLPGWMGQNCDININDCLGQCQNDASCRLDIDYCEPNPCQNGAQCYNRASDYFCKCPEDYEGKNCSHLKDHCRTTPCEVIDSCTVAMASNDTPEGVRYISSNVCGPHGKCKSQSGGKFTCDCNKGFTGTYCHENINDCESNPCRNGGTCIDGVNSYKCICSDGWEGAYCETNINDCSQNPCHNGGTCRDLVNDFYCDCKNGWKGKTCHSRDSQCDEATCNNGGTCYDEGDAFKCMCPGGWEGTTCNIARNSSCLPNPCHNGGTCVVNGESFTCVCKEGWEGPICAQNTNDCSPHPCYNSGTCVDGDNWYRCECAPGFAGPDCRININECQSSPCAFGATCVDEINGYRCVCPPGHSGAKCQEVSGRPCITMGSVIPDGAKWDDDCNTCQCLNGRIACSKVWCGPRPCLLHKGHSECPSGQSCIPILDDQCFVHPCTGVGECRSSSLQPVKTKCTSDSYYQDNCANITFTFNKEMMSPGLTTEHICSELRNLNILKNVSAEYSIYIACEPSPSANNEIHVAISAEDIRDDGNPIKEITDKIIDLVSKRDGNSSLIAAVAEVRVQRRPLKNRTDFLVPLLSSVLTVAWICCLVTAFYWCLRKRRKPGSHTHSASEDNTTNNVREQLNQIKNPIEKHGANTVPIKDYENKNSKMSKIRTHNSEVEEDDMDKHQQKARFAKQPAYTLVDREEKPPNGTPTKHPNWTNKQDNRDLESAQSLNRMEYIV

SEQ ID NO: 117 - protein, 1179 aa, Artificial sequence
  A novel predicted alternative spliced variant protein product
MRSPRTRGRSGRPLSLLLALLCALRAKVCGASGQFELEILSMQNVNGELQNGNCCGGARNPGDRKCTRDECDTYFKVCLKEYQSRVTAGGPCSFGSGSTPVIGGNTFNLKASRGNDRNRIVLPFSFAWPRSYTLLVEAWDSSNDTVQPDSIIEKASHSGMINPSRQWQTLKQNTGVAHFEYQIRVTCDDYYYGFGCNKFCRPRDDFFGHYACDQNGNKTCMEGWMGPECNRAICRQGCSPKHGSCKLPGDCRCQYGWQGLYCDKCIPHPGCVHGICNEPWQCLCETNWGGQLCDKDLNYCGTHQPCLNGGTCSNTGPDKYQCSCPEGYSGPNCEIAEHACLSDPCHNRGSCKETSLGFECECSPGWTGPTCSTNIDDCSPNNCSHGGTCQDLVNGFKCVCPPQWTGKTCQLDANECEAKPCVNAKSCKNLIASYYCDCLPGWMGQNCDININDCLGQCQNDASCRDLVNGYRCICPPGYAGDHCERDIDECASNPCLNGGHCQNEINRFQCLCPTGFSGNLCQLDIDYCEPNPCQNGAQCYNRASDYFCKCPEDYEGKNCSHLKDHCRTTPCEVIDSCTVAMASNDTPEGVRYISSNVCGPHGKCKSQSGGKFTCDCNKGFTGTYCHENINDCESNPCRNGGTCIDGVNSYKCICSDGWEGAYCETNINDCSQNPCHNGGTCRDLVNDFYCDCKNGWKGKTCHSRDSQCDEATCNNGGTCYDEGDAFKCMCPGGWEGTTCNIDTNDCSPHPCYNSGTCVDGDNWYRCECAPGFAGPDCRININECQSSPCAFGATCVDEINGYRCVCPPGHSGAKCQEVSGRPCITMGSVIPDGAKWDDDCNTCQCLNGRIACSKVWCGPRPCLLHKGHSECPSGQSCIPILDDQCFVHPCTGVGECRSSSLQPVKTKCTSDSYYQDNCANITFTFNKEMMSPGLTTEHICSELRNLNILKNVSAEYSIYIACEPSPSANNEIHVAISAEDIRDDGNPIKEITDKIIDLVSKRDGNSSLIAAVAEVRVQRRPLKNRTDFLVPLLSSVLTVAWICCLVTAFYWCLRKRRKPGSHTHSASEDNTTNNVREQLNQIKNPIEKHGANTVPIKDYENKNSKMSKIRTHNSEVEEDDMDKHQQKARFAKQPAYTLVDREEKPPNGTPTKHPNWTNKQDNRDLESAQSLNRMEYIV

SEQ ID NO: 118 - protein, 912 aa, Artificial sequence
  A novel predicted alternative spliced variant protein product
MRSPRTRGRSGRPLSLLLALLCALRAKVCGASGQFELEILSMQNVNGELQNGNCCGGARNPGDRKCTRDECDTYFKVCLKEYQSRVTAGGPCSFGSGSTPVIGGNTFNLKASRGNDRNRIVLPFSFAWPRSYTLLVEAWDSSNDTVQPDSIIEKASHSGMINPSRQWQTLKQNTGVAHFEYQIRVTCDDYYYGFGCNKFCRPRDDFFGHYACDQNGNKTCMEGWMGPECNRAICRQGCSPKHGSCKLPGDCRCQYGWQGLYCDKCIPHPGCVHGICNEPWQCLCETNWGGQLCDKDLNYCGTHQPCLNGGTCSNTGPDKYQCSCPEGYSGPNCEIAEHACLSDPCHNRGSCKETSLGFECECSPGWTGPTCSTNIDDCSPNNCSHGGTCQDLVNGFKCVCPPQWTGKTCQLDANECEAKPCVNAKSCKNLIASYYCDCLPGWMGQNCDININDCLGQCQNDASCRDLVNGYRCICPPGYAGDHCERDIDECASNPCLNGGHCQNEINRFQCLCPTGFSGNLCQLDIDYCEPNPCQNGAQCYNRASDYFCKCPEDYEGKNCSHLKDHCRTTPCEVIDSCTVAMASNDTPEGVRYISSNVCGPHGKCKSQSGGKFTCDCNKGFTGTYCHENINDCESNPCRNGGTCIDGVNSYKCICSDGWEGAYCETNINDCSQNPCHNGGTCRDLVNDFYCDCKNGWKGKTCHSRDSQCDEATCNNGGTCYDEGDAFKCMCPGGWEGTTCNIARNSSCLPNPCHNGGTCVVNGESFTCVCKEGWEGPICAQNTNDCSPHPCYNSGTCVDGDNWYRCECAPGFAGPDCRININECQSSPCAFGATCVDEINGYRCVCPPGHSGAKCQEGLVPSILPAPQRAQRVPQRAELHPHPGRPVLRPPLHWCGRVSVFQSPAGEDKVHL

SEQ ID NO: 119 - protein, 2433 aa, Artificial sequence
  A novel predicted alternative spliced variant protein product
MPALRPALLWALLALWLCCAAPAHALQCRDGYEPCVNEGMCVTYHNGTGYCKCPEGFLGEYCQHRDPCEKNRCQNGGTCVAQAMLGKATCRCASGFTGEDCQYSTSHPCFVSRPCLNGGTCHMLSRDTYECTCQVGFTGKECQWTDACLSHPCANGSTCTTVANQFSCKCLTGFTGQKCETDVNECDIPGHCQHGGTCLNLPGSYQCQCPQGFTGQYCDSLYVPCAPSPCVNGGTCRQTGDFTFECNCLPGFEGSTCERNIDDCPNHRCQNGGVCVDGVNTYNCRCPPQWTGQFCTEDVDECLLQPNACQNGGTCANRNGGYGCVCVNGWSGDDCSENIDDCAFASCTPGSTCIDRVASFSCMCPEGKAGLLCHLDDACISNPCHKGALCDTNPLNGQYICTCPQGYKGADCTEDVDECAMANSNPCEHAGKCVNTDGAFHCECLKGYAGPRCEMDINECHSDPCQNDATCLDKIGGFTCLCMPGFTGPVCQIDIDDCSSTPCLNGAKCIDHPNGYECQCATGFTGVLCEENIDNCDPDPCHHGQCQDGIDSYTCICNPGYMGAICSDQIDECYSSPCLNDGRCIDLVNGYQCNCQPGTSGVNCEINFDDCASNPCIHGICMDGINRYSCVCSPGFTGQRCNIDIDECASNPCRKGATCINGVNGFRCICPEGPHHPSCYSQVNECLSNPCIHGNCTGGLSGYKCLCDAGWVGINCEVDKNECLSNPCQNGGTCDNLVNGYRCTCKKGFKGYNCQVNIDECASNPCLNQGTCFDDISGYTCHCVLPYTGKNCQTVLAPCSPNPCENAAVCKESPNFESYTCLCAPGWQGQRCTIDIDECISKPCMNHGLCHNTQGSYMCECPPGFSGMDCEEDIDDCLANPCQNGGSCMDGVNTFSCLCLPGFTGDKCQTDMNECLSEPCKNGGTCSDYVNSYTCKCQAGFDGVHCENNINECTESSCFNGGTCVDGINSFSCLCPVGFTGSFCLHEINECSSHPCLNEGTCVDGLGTYRCSCPLGYTGKNCQTLVNLCSRSPCKNKGTCVQKKAESQCLCPSGWAGAYCDVPNVSCDIAASRRGVLVEHLCQHSGVCINAGNTHYCQCPLGYTGSYCEEQLDECASNPCQHGATCSDFIGGYRCECVPGYQGVNCEYEVDECQNQPCQNGGTCIDLVNHFKCSCPPGTRGLLCEENIDDCARGPHCLNGGQCMDRIGGYSCRCLPGFAGERCEGDINECLSNPCSSEGSLDCIQLTNDYLCVCRSAFTGRHCETFVDVCPQMPCLNGGTCAVASNMPDGFICRCPPGFSGARCQSSCGQVKCRKGEQCVHTASGPRCFCPSPRDCESGCASSPCQHGGSCHPQRQPPYYSCQCAPPFSGSRCELYTAPPSTPPATCLSQYCADKARDGVCDEACNSHACQWDGGDCSLTMENPWANCSSPLPCWDYINNQCDELCNTVECLFDNFECQGNSKTCKYDKYCADHFKDNHCNQGCNSEECGWDGLDCAADQPENLAEGTLVIVVLMPPEQLLQDARSFLRALGTLLHTNLRIKRDSQGELMVYPYYGEKSAAMKKQRMTRRSLPGEQEQEVAGSKVFLEIDNRQCVQDSDHCFKNTDAAAALLASHAIQGTLSYPLVSVVSESLTPERTQLLYLLAVAVVIILFIILLGVIMAKRKRKHGSLWLPEGFTLRRDASNHKRREPVGQDAVGLKNLSVQVSEANLIGTGTSEHWVDDEGPQPKKVKAEDEALLSEEDDPIDRRPWTQQHLEAADIRRTPSLALTPPQAEQEVDVLDVNVRGPDGCTPLMLASLRGGSSDLSDEDEDAEDSSANIITDLVYQGASLQAQTDRTGEMALHLAARYSRADAAKRLLDAGADANAQDNMGRCPLHAAVAADAQGVFQILIRNRVTDLDARMNDGTTPLILAARLAVEGMVAELINCQADVNAVDDHGKSALHWAAAVNNVEATLLLLKNGANRDMQDNKEETPLFLAAREGSYEAAKILLDHFANRDITDHMDRLPRDVARDRMHHDIVRLLDEYNVTPSPPGTVLTSALSPVICGPNRSFLSLKHTPMGKKSRRPSAKSTMPTSLPNLAKEAKDAKGSRRKKSLSEKVQLSESSVTLSPVDSLESPHTYVSDTTSSPMITSPGILQASPNPMLATAAPPAPVHAQHALSFSNLHEMQPLAHGASTVLPSVSQLLSHHHIVSPGSGSAGSLSRLHPVPVPADWMNRMEVNETQYNEMFGMVLAPAEGTHPGIAPQSRPPEGKHITTPREPLPPIVTFQLIPKGSIAQPAGAPQPQSTCPPAVAGPLPTMYQIPEMARLPSVAFPTAMMPQQDGQVAQTILPAYHPFPASVGKYPTPPSQHSYASSNAAERTPSHSGHLQGEHPYLTPSPESPDQWSSSSPHSASDWSDVTTSPTPGGAGGGQRGPGTHMSEPPHNNMQVYA

SEQ ID NO: 120 - protein, 2434 aa, Artificial sequence
  A novel predicted alternative spliced variant protein product
MPALRPALLWALLALWLCCAAPAHALQCRDGYEPCVNEGMCVTYHNGTGYCKCPEGFLGEYCQHRDPCEKNRCQNGGTCVAQAMLGKATCRCASGFTGEDCQYSTSHPCFVSRPCLNGGTCHMLSRDTYECTCQVGFTGKECQWTDACLSHPCANGSTCTTVANQFSCKCLTGFTGQKCETDVNECDIPGHCQHGGTCLNLPGSYQCQCPQGFTGQYCDSLYVPCAPSPCVNGGTCRQTGDFTFECNCLPGFEGSTCERNIDDCPNHRCQNGGVCVDGVNTYNCRCPPQWTGQFCTEDVDECLLQPNACQNGGTCANRNGGYGCVCVNGWSGDDCSENIDDCAFASCTPGSTCIDRVASFSCMCPEGKAGLLCHLDDACISNPCHKGALCDTNPLNGQYICTCPQGYKGADCTEDVDECAMANSNPCEHAGKCVNTDGAFHCECLKGYAGPRCEMDINECHSDPCQNDATCLDKIGGFTCLCMPGFKGVHCELEINECQSNPCVNNGQCVDKVNRFQCLCPPGFTGPVCQIDIDDCSSTPCLNGAKCIDHPNGYECQCATGFTGVLCEENIDNCDPDPCHHGQCQDGIDSYTCICNPGYMGAICSDQIDECYSSPCLNDGRCIDLVNGYQCNCQPGTSGQRCNIDIDECASNPCRKGATCINGVNGFRCICPEGPHHPSCYSQVNECLSNPCIHGNCTGGLSGYKCLCDAGWVGINCEVDKNECLSNPCQNGGTCDNLVNGYRCTCKKGFKGYNCQVNIDECASNPCLNQGTCFDDISGYTCHCVLPYTGKNCQTVLAPCSPNPCENAAVCKESPNFESYTCLCAPGWQGQRCTIDIDECISKPCMNHGLCHNTQGSYMCECPPGFSGMDCEEDIDDCLANPCQNGGSCMDGVNTFSCLCLPGFTGDKCQTDMNECLSEPCKNGGTCSDYVNSYTCKCQAGFDGVHCENNINECTESSCFNGGTCVDGINSFSCLCPVGFTGSFCLHEINECSSHPCLNEGTCVDGLGTYRCSCPLGYTGKNCQTLVNLCSRSPCKNKGTCVQKKAESQCLCPSGWAGAYCDVPNVSCDIAASRRGVLVEHLCQHSGVCINAGNTHYCQCPLGYTGSYCEEQLDECASNPCQHGATCSDFIGGYRCECVPGYQGVNCEYEVDECQNQPCQNGGTCIDLVNHFKCSCPPGTRGLLCEENIDDCARGPHCLNGGQCMDRIGGYSCRCLPGFAGERCEGDINECLSNPCSSEGSLDCIQLTNDYLCVCRSAFTGRHCETFVDVCPQMPCLNGGTCAVASNMPDGFICRCPPGFSGARCQSSCGQVKCRKGEQCVHTASGPRCFCPSPRDCESGCASSPCQHGGSCHPQRQPPYYSCQCAPPFSGSRCELYTAPPSTPPATCLSQYCADKARDGVCDEACNSHACQWDGGDCSLTMENPWANCSSPLPCWDYINNQCDELCNTVECLFDNFECQGNSKTCKYDKYCADHFKDNHCNQGCNSEECGWDGLDCAADQPENLAEGTLVIVVLMPPEQLLQDARSFLRALGTLLHTNLRIKRDSQGELMVYPYYGEKSAAMKKQRMTRRSLPGEQEQEVAGSKVFLEIDNRQCVQDSDHCFKNTDAAAALLASHAIQGTLSYPLVSVVSESLTPERTQLLYLLAVAVVIILFIILLGVIMAKRKRKHGSLWLPEGFTLRRDASNHKRREPVGQDAVGLKNLSVQVSEANLIGTGTSEHWVDDEGPQPKKVKAEDEALLSEEDDPIDRRPWTQQHLEAADIRRTPSLALTPPQAEQEVDVLDVNVRGPDGCTPLMLASLRGGSSDLSDEDEDAEDSSANIITDLVYQGASLQAQTDRTGEMALHLAARYSRADAAKRLLDAGADANAQDNMGRCPLHAAVAADAQGVFQILIRNRVTDLDARMNDGTTPLILAARLAVEGMVAELINCQADVNAVDDHGKSALHWAAAVNNVEATLLLLKNGANRDMQDNKEETPLFLAAREGSYEAAKILLDHFANRDITDHMDRLPRDVARDRMHHDIVRLLDEYNVTPSPPGTVLTSALSPVICGPNRSFLSLKHTPMGKKSRRPSAKSTMPTSLPNLAKEAKDAKGSRRKKSLSEKVQLSESSVTLSPVDSLESPHTYVSDTTSSPMITSPGILQASPNPMLATAAPPAPVHAQHALSFSNLHEMQPLAHGASTVLPSVSQLLSHHHIVSPGSGSAGSLSRLHPVPVPADWMNRMEVNETQYNEMFGMVLAPAEGTHPGIAPQSRPPEGKHITTPREPLPPIVTFQLIPKGSIAQPAGAPQPQSTCPPAVAGPLPTMYQIPEMARLPSVAFPTAMMPQQDGQVAQTILPAYHPFPASVGKYPTPPSQHSYASSNAAERTPSHSGHLQGEHPYLTPSPESPDQWSSSSPHSASDWSDVTTSPTPGGAGGGQRGPGTHMSEPPHNNMQVYA

SEQ ID NO: 121 - protein, 208 aa, Artificial sequence
  A novel predicted alternative spliced variant protein product
MGPGARGRRRRRRPMSPPPPPPPVRALPLLLLLAGPGAAGARLAGWVSGVSWRTPVTQAPVLAVVSARVQWWLAPPDSHAGAPVASEALTAPCQIPASAALVPTVPAAQWGPMDASSAPAHLATRAAAAEATWMSAGWVSPAAMVAPASTHLAPSAASVQLATQGHYVRTPRCPVHPHHAVTGAPAGRVATSLTTVPVFLGLRVRIVK

SEQ ID NO: 122 - protein, 1938 aa, Artificial sequence
  A novel predicted alternative spliced variant protein product
MQPPSLLLLLLLLLLLCVSVVRPRGLLCGSFPEPCANGGTCLSLSLGQGTCQCAPGFLGETCQFPDPCQNAQLCQNGGSCQALLPAPLGLPSSPSPLTPSFLCTCLPGFTGERCQAKLEDPCPPSFCSKRGRCHIQASGRPQCSCMPGWTGEQCQLRDFCSANPCVNGGVCLATYPQIQCHCPPGFEGHACERDVNECFQDPGPCPKGTSCHNTLGSFQCLCPVGQEGPRCELRAGPCPPRGCSNGGTCQLMPEKDSTFHLCLCPPGFIGPDCEVNPDNCVSHQCQNGGTCQDGLDTYTCLCPETWTGWDCSEDVDECETQGPPHCRNGGTCQNSAGSFHCVCVSGWGGTSCEENLDDCIAATCAPGSTCIDRVGSFSCLCPPGRTGLLCHLEDMCLSQPCHGDAQCSTNPLTGSTLCLCQPGYSGPTCHQDLDECLMGLEGQLCEVETNECASAPCLNHADCHDLLNGFQCICLPGFSGTRCEEDIDECRSSPCANGGQCQDQPGAFHCKCLPGFEGPRCQTEVDECLSDPCPVGASCLDLPGAFFCLCPSGFTGQLCEVPLCAPNLCQPKQICKDQKDKANCLCPDGSPGCAPPEDNCTCHHGHCQRSSCVCDVGWTGPECEAELGGCISAPCAHGGTCYPQPSGYNCTCPTGYTGPTCSEEMTACHSGPCLNGGSCNPSPGGYYCTCPPSHTGPQCQTSTDYCVSAPCFNGGTCVNRPGTFSCLCAMGFQGPRCEGKLRPSCADSPCRNRATCQDSPQGPRCLCPTGYTGGSCQTLMDLCAQKPCPRNSHCLQTGPSFHCLCLQGWTGPLCNLPLSSCQKAALSQGIDVSSLCHNGGLCVDSGPSYFCHCPPGFQGSLCQDHVNPCESRPCQNGATCMAQPSGYLCQCAPGYDGQNCSKELDACQSQPCHNHGTCTPKPGGFHCACPPGFVGLRCEGDVDECLDQPCHPTGTAACHSLANAFYCQCLPGHTGQWCEVEIDPCHSQPCFHGGTCEATAGSPLGFICHCPKGFEGPTCSHRAPSCGFHHCHHGGLCLPSPKPGFPPRCACLSGYGGPDCLTPPAPKGCGPPSPCLYNGSCSETTGLGGPGFRCSCPHSSPGPRCQKPGAKGCEGRSGDGACDAGCSGPGGNWDGGDCSLGVPDPWKGCPSHSRCWLLFRDGQCHPQCDSEECLFDGYDCETPPACTPAYDQYCHDHFHNGHCEKGCNTAECGWDGGDCRPEDGDPEWGPSLALLVVLSPPALDQQLFALARVLSLTLRVGLWVRKDRDGRDMVYPYPGARAEEKLGGTRDPTYQERAAPQTQPLGKETDSLSAGFVVVMGVDLSRCGPDHPASRCPWDPGLLLRFLAAMAAVGALEPLLPGPLLAVHPHAGTAPPANQLPWPVLCSPVAGVILLALGALLVLQLIRRRRREHGALWLPPGFTRRPRTQSAPHRRRPPLGEDSIGLKALKPKAEVDEDGVVMCSGPEEGEEVGQAEETGPPSTCQLWSLSGGCGALPQAAMLTPPQESEMEAPDLDTRGPDGVTPLMSAVCCGEVQSGTFQGAWLGCPEPWEPLLDGGACPQAHTVGTGETPLHLAARFSRPTAARRLLEAGANPNQPDRAGRTPLHAAVAADAREVCQLLLRSRQTAVDARTEDGTTPLMLAARLAVEDLVEELIAAQADVGARDKWGKTALHWAAAVNNARAARSLLQAGADKDAQDNREQTPLFLAAREGAVEVAQLLLGLGAARELRDQAGLAPADVAHQRNHWDLLTLLEGAGPPEARHKATPGREAGPFPRARTVSVSVPPHGGGALPRCRTLSAGAGPRGGGACLQARTWSVDLAARGGGAYSHCRSLSGVGAGGGPTPRGRRFSAGMRGPRPNPAIMRGRYGVAAGRGGRVSTDDWPCDWVALGACGSASNIPIPPPCLTPSPERGSPQLDCGPPALQEMPINQGGEGKK

SEQ ID NO: 123 - protein, 759 aa, Artificial sequence
  A novel predicted alternative spliced variant protein product
MSSWIRWHGPAMARLWGFCWLVVGFWRAAFACPTSCKCSASRIWCSDPSPGIVAFPRLEPNSVDPENITEIFIANQKRLEIINEDDVEAYVGLRNLTIVDSGLKFVAHKAFLKNSNLQHINFTRNKLTSLSRKHFRHLDLSELILVGNPFTCSCDIMWIKTLQEAKSSPDTQDLYCLNESSKNIPLANLQIPNCGLPSANLAAPNLTVEEGKSITLSCSVAGDPVPNMYWDVGNLVSKHMNETSHTQGSLRITNISSDDSGKQISCVAENLVGEDQDSVNLTVHFAPTITFLESPTSDHHWCIPFTVKGNPKPALQWFYNGAILNESKYICTKIHVTNHTEYHGCLQLDNPTHMNNGDYTLIAKNEYGKDEKQISAHFMGWPGIDDGANPNYPDVIYEDYGTAANDIGDTTNRSNEIPSTDVTDKTGREHLSVYAVVVIASVVGFCLLVMLFLLKLARHSKFGMKVVQHIKRHNIVLKRELGEGAFGKVFLAECYNLCPEQDKILVAVKTLKDASDNARKDFHREAELLTNLQHEHIVKFYGVCVEGDPLIMVFEYMKHGDLNKFLRAHGPDAVLMAEGNPPTELTQSQMLHIAQQIAAGMVYLASQHFVHRDLATRNCLVGENLLVKIGDFGMSRDVYSTDYYRVGGHTMLPIRWMPPESIMYRKFTTESDVWSLGVVLWEIFTYGKQPWYQLSNNEVIECITQGRVLQRPRTCPQEVYELMLGCWQREPHMRKNIKGIHTLLQNLAKASPVYLDILG

SEQ ID NO: 124 - protein, 816 aa, Artificial sequence
  A novel predicted alternative spliced variant protein product
MDVSLCPAKCSFWRIFLLGSVWLDYVGSVLACPANCVCSKTEINCRRPDDGNLFPLLEGQDSGNSNGNANINITDISRNITSIHIENWRSLHTLNAVDMELYTGLQKLTIKNSGLRSIQPRAFAKNPHLRYMQLEQNFFNCSCDIRWMQLWQEQGEAKLNSQNLYCINADGSQLPLFRMNISQCDLPEISVSHVNLTVREGDNAVITCNGSGSPLPDVDWIVTGLQSINTHQTNLNWTNVHAINLTLVNVTSEDNGFTLTCIAENVVGMSNASVALTVYYPPRVVSLEEPELRLEHCIEFVVRGNPPPTLHWLHNGQPLRESKIIHVEYYQEGEISEGCLLFNKPTHYNNGNYTLIAKNPLGTANQTINGHFLKEPFPESTDNFILFDEVSPTPPITVTHKPEEDTFGVSIAVGLAAFACVLLVVLFVMINKYGRRSKFGMKGPVAVISGEEDSASPLHHINHGITTPSSLDAGPDTVVIGMTRIPVIENPQYFRQGHNCHKPDTYVQHIKRRDIVLKRELGEGAFGKVFLAECYNLSPTKDKMLVAVKALKDPTLAARKDFQREAELLTNLQHEHIVKFYGVCGDGDPLIMVFEYMKHGDLNKFLRAHGPDAMILVDGQPRQAKGELGLSQMLHIASQIASGMVYLASQHFVHRDLATRNCLVGANLLVKIGDFGMSRDVYSTDYYRLFNPSGNDFCIWCEVGGHTMLPIRWMPPESIMYRKFTTESDVWSFGVILWEIFTYGKQPWFQLSNTEVIECITQGRVLERPRVCPKEVYDVMLGCWQREPQQRLNIKEIYKILHALGKATPIYLDILG

SEQ ID NO: 125 - protein, 662 aa, Artificial sequence
  A novel predicted alternative spliced variant protein product
MDVSLCPAKCSFWRIFLLGSVWLDYVGSVLACPANCVCSKTEINCRRPDDGNLFPLLEGQDSGNSNGNANINITDISRNITSIHIENWRSLHTLNAVDMELYTGLQKLTIKNSGLRSIQPRAFAKNPHLRYINLSSNRLTTLSWQLFQTLSLRELQLEQNFFNCSCDIRWMQLWQEQGEAKLNSQNLYCINADGSQLPLFRMNISQCDLPEISVSHVNLTVREGDNAVITCNGSGSPLPDVDWIVTGLQSINTHQTNLNWTNVHAINLTLVNVTSEDNGFTLTCIAENVVGMSNASVALTVYYPPRVVSLEEPELRLEHCIEFVVRGNPPPTLHWLHNGQPLRESKIIHVEYYQEGEISEGCLLFNKPTHYNNGNYTLIAKNPLGTANQTINGHFLKEPFPESTDNFILFDEVSPTPPITVTHKPEEDTFGVSIAVGLAAFACVLLVVLFVMINKYGRRSKFGMKGPVAVISGEEDSASPLHHINHGITTPSSLDAGPDTVVIGMTRIPVIENPQYFRQGHNCHKPDTYVQHIKRRDIVLKRELGEGAFGKVFLAECYNLSPTKDKMLVAVKALKDPTLAARKDFQREAELLTNLQHEHIVKFYGVCGDGDPLIMVFEYMKHGDLNKFLRWEDTPCSPFAGCLLKASCTGSSLQRVMYGASG

SEQ ID NO: 126 - protein, 437 aa, Artificial sequence
  A novel predicted alternative spliced variant protein product
MFLATLYFALPLLDLLLSAEVSGGDRLDCVKASDQCLKEQSCSTKYRTLRQCVAGKETNFSLASGLEAKDECRSAMEALKQKSLYNCRCKRGMKKEKNCLRIYWSMYQSLQDVFQQVEHIPKGNNCLDAAKACNLDDICKKYRSAYITPCTTSVSNDVCNRRKCHKALRQFFDKVPAKHSYGMLFCSCRDIACTERRRQTIVPVCSYEEREKPNCLNLQDSCKTNYICRSRLADFFTNCQPESRSVSSCLKENYADCLLAYSGLIGTVMTPNYIDSSSLSVAPWCDCSNSGNDLEECLKFLNFFKDNTCLKNAIQAFGNGSDVTVWQPAFPVQTTTATTTTALRVKNKPLGPAGSENEIPTHVLPPCANLQAQKLKSNVSGNTHLCISNGNYEKEGLGASSHITTKSMAAPPSCGLSPLLVLVVTALSTLLSLTETS

SEQ ID NO: 127 - protein, 436 aa, Artificial sequence
  A novel predicted alternative spliced variant protein product
MILANVFCLFFFLDETLRSLASPSSLQGPELHGWRPPVDCVRANELCAAESNCSSRYRTLRQCLAGRDRNTMLANKECQAALEVLQESPLYDCRCKRGMKKELQCLQIYWSIHLGLTEGTGADPVVSAKSNHCLDAAKACNLNDNCKKLRSSYISICNREISPTERCNRRKCHKALRQFFDRVPSEYTYRMLFCSCQDQACAERRRQTILPSCSYEDKEKPNCLDLRGVCRTDHLCRSRLADFHANCRASYQTVTSCPADNYQACLGSYAGMIGFDMTPNYVDSSPTGIVVSPWCSCRGSGNMEEECEKFLRDFTENPCLRNAIQAFGNGTDVNVSPKGPSFQATQAPRVEKTPSLPDDLSDSTSLGTSVITTCTSVQEQGLKANNSKELSMCFTELTTNIIPGSNKVIKPNSGPSRARPSAALTVLSVLMLKQAL

SEQ ID NO: 128 - protein, 116 aa, Artificial sequence
  A novel predicted alternative spliced variant protein product
MESHSRAGKSRKSAKFRSISRSLMLCNAKTSDDGSSPDEKYPDPFEISLAQGKEGIFHSSVQLADTSEAGPSSVPDLALASEAAQLQAAGNDRGKTCRRIFFMVLIPIAQEKLIFQ

SEQ ID NO: 129 - protein, 1210 aa, Artificial sequence
  A novel predicted alternative spliced variant protein product
MESHSRAGKSRKSAKFRSISRSLMLCNAKTSDDGSSPDEKYPDPFEISLAQGKEGIFHSSVQLADTSEAGPSSVPDLALASEAAQLQAAGNDRGKTCRRIFFMKESSTASSREKPGKLEAQSSNFLFPKACHQRARSNSTSVNPYCTREIDFPMTKKSAAPTDRQPYSLCSNRKSLSQQLDCPAGKAAGTSRPTRSLSTAQLVQPSGGLQASVISNIVLMKGQAKGLGFSIVGGKDSIYGPIGIYVKTIFAGGAAAADGRLQEGDEILELNGESMAGLTHQDALQKFKQAKKGLLTLTVRTRLTAPPSLCSHLSPPLCRSLSSSTCITKDSSSFALESPSAPISTAKPNYRIMVEVSLQKEAGVGLGIGLCSVPYFQCISGIFVHTLSPGSVAHLDGRLRCGDEIVEISDSPVHCLTLNEVYTILSHCDPGPVPIIVSRHPDPQVSEQQLKEAVAQAVENTKFGKERHQWSLEGVKRLESSWHGRPTLEKEREKNSAPPHRRAQKVMIRSSSDSSYMSGSPGGSPGSGSAEKPSSDVDISTHSPSLPLAREPVVLSIASSRLPQESPPLPESRDSHPPLRLKKSFEILEARELLPLLLPQEDTAGRSPSASAGCPGPGIGPQTKSSTEGEPGWRRASPVTQTSPIKHPLLKRQARMDYSFDTTAEDPWVRISDCIKNLFSPIMSENHGHMPLQPNASLNEEEGTQGHPDGTPPKLDTANGTPKVYKSADSSTVKKGPPVAPKPAWFRQSLKGLRNRASDPRGLPDPALSTQPAPASREHLGSHIRASSSSSSIRQRISSFETFGSSQLPDKGAQRLSLQPSSGEAAKPLGKHEEGRFSGLLGRGAAPTLVPQQPEQVLSSGSPAASEARDPGVSESPPPGRQPNQKTLPPGPDPLLRLLSTQAEESQGPVLKMPSQRARSFPLTRSQSCETKLLDEKTSKLYSISSQVSSAVMKSLLCLPSSISCAQTPCIPKEGASPTSSSNEDSAANGSAETSALDTGFSLNLSELREYTEGLTEAKEDDDGDHSSLQSGQSVISLLSSEELKKLIEEVKVLDEATLKVHRVFPNGLASQEGTIQKGNEVLSINGKSLKGTTHHDALAILRQAREPRQAVIVTRKLTPEAMPDLNSSTDSAASASAASDVSVESTAEATVCTVTLEKMSAGLGFSLEGGKGSLHGDKPLTINRIFKGGHRGLRARGKIPVNIVAQKSH

SEQ ID NO: 130 - protein, 213 aa, Artificial sequence
  A novel predicted alternative spliced variant protein product
MLPLCLVAALLLAAGPGPSLGDEAIHCPPCSEEKLARCRPPVGCEELVREPGCGCCATCALGLGMPCGVYTPRCGSGLRCYPPRGVEKPLHTLMHGQGVCMELAEIEAIQESLQPSDKDEGDHPNNSFSPCSAHDRRCLQKHFAKIRDRSTSGGKMKVNGAPREDARPVCHPALDGQRGKCWCVDRKTGVKLPGGLEPKGELDCHQLADSFRE

SEQ ID NO: 131 - protein, 871 aa, Artificial sequence
  A novel predicted alternative spliced variant protein product
MERGLPLLCAVLALVLAPAGAFRNDKCGDTIKIESPGYLTSPGYPHSYHPSEKCEWLIQAPDPYQRIMINFNPHFDLEDRDCKYDYVEVFDGENENGHFRGKFCGKIAPPPVVSSGPFLFIKFVSDYETHGAGFSIRYEIFKRGPECSQNYTTPSGVIKSPGFPEKYPNSLECTYIVFAPKMSEIILEFESFDLEPDSNPPGGMFCRYDRLEIWDGFPDDFKCMEALGMESGEIHSDQITASSQYSTNWSAERSRLNYPENGWTPGEDSYREWIQVDLGLLRFVTAVGTQGAISKETKKKYYVKTYKIDVSSNGEDWITIKEGNKPVLFQGNTNPTDVVVAVFPKPLITRFVRIKPATWETGISMRFEVYGCKITDYPCSGMLGMVSGLISDSQITSSNQGDRNWMPENIRLVTSRSGWALPPAPHSYINEWLQIDLGEEKIVRGIIIQGGKHRENKVFMRKFKIGYSNNGSDWKMIMDDSKRKAKSFEGNNNYDTPELRTFPALSTRFIRIYPERATHGGLGLRMELLGCEVEAPTAGPTTPNGNLVDECDDDQANCHSGTGDDFQLTGGTTVLATEKPTVIDSTIQSEFPTYGFNCEFGWGSHKTFCHWEHDNHVQLKWSVLTSKTGPIQDHTGDGNFIYSQADENQKGKVARLVSPVVYSQNSAHCMTFWYHMSGSHVGTLRVKLRYQKPEEYDQLVWMAIGHQGDHWKEGRVLLHKSLKLYQVIFEGEIGKGNLGGIAVDDISINNHISQEDCAKPADLDKKNPEIKIDETGSTPGYEGEGEGDKNISRKPGNVLKTLEPILITIIAMSALGVLLGAVCGVVLYCACWHNGMSERNLSALENYNFELVDGVKLKKDKLNTQSTYSEA

SEQ ID NO: 132 - protein, 110 aa, Artificial sequence
  A novel predicted alternative spliced variant protein product
MAPLGEVGNYFGVQDAVPFGNVPVLPVDSPVLLSDHLGQSEAGGLPRGPAVTDLDHLKGILRRRQLYCRTGFHLEIFPNGTIQGTRKDHSRFGKTNPRVCIQRTVRRKLV

SEQ ID NO: 133 - protein, 111 aa, Artificial sequence
  A novel predicted alternative spliced variant protein product
MWKWILTHCASAFPHLPGCCCCCFLLLFLVSSVPVTCQALGQDMVSPEATNSSSSSFSSPSSAGRHVRSYNHLQGDVRWRKLFSFTKYFLKIEKNGKVSGTKKENCPYKRI

SEQ ID NO: 134 - protein, 35 aa, Artificial sequence
  A novel predicted alternative spliced variant protein product
MYSAPSACTCLCWLPRRTWTSAASTWRTRRGLGTM

SEQ ID NO: 135 - protein, 108 aa, Artificial sequence
  A novel predicted alternative spliced variant protein product
MYSAPSACTCLCLHFLLLCFQVQVLVAEENVDFRIHVENQTRARDDVSRKQLRLYQLYSRTSGKHIQVLGRRISARGEDGDKYARWHQQGVWVHREGSGEQLHGPDVG

SEQ ID NO: 136 - protein, 287 aa, Artificial sequence
  A novel predicted alternative spliced variant protein product
MTVFLSFAFLAAILTHIGCSNQRRSPENSGRRYNRIQHGQCAYTFILPEHDGNCRESTTDQYNTNALQRDAPHVEPDFSSQKLQHLEHVMENYTQWLQKLENYIVENMKSEMAQIQQNAVQNHTATMLEIGTSLLSQTAEQTRKLTDVETQVLNQTSRLEIQLLENSLSTYKLEKQLLQQTNEILKIHEKNSLLEHKILEMEGKHKEELDTLKEEKENLQGLVTRQTYIIQELEKQLNRATTNNSVLQKQQLELMDTVHNLVNLCTKEGGVLQYGCQWGRLDCNTTS

SEQ ID NO: 137 - protein, 464 aa, Artificial sequence
  A novel predicted alternative spliced variant protein product
MTVFLSFAFLAAILTHIGCSNQRRSPENSGRRYNRIQHGQCAYTFILPEHDGNCRESTTDQYNTNALQRDAPHVEPDFSSQKLQHLEHVMENYTQWLQKLENYIVENMKSEMAQIQQNAVQNHTATMLEIGTSLLSQTAEQTRKLTDVETQVLNQTSRLEIQLLENSLSTYKLEKQLLQQTNEILKIHEKNSLLEHKILEMEGKHKEELDTLKEEKENLQGLVTRQTYIIQELEKQLNRATTNNSVLQKQQLELMDTVHNLVNLCTKEGVLLKGGKREEEKPFRDCADVYQAGFNKSGIYTIYINNMPEPKKGFGNPSGEYWLGNEFIFAITSQRQYMLRIELMDWEGNRAYSQYDRFHIGNEKQNYRLYLKGHTGTAGKQSSLILHGADFSTKDADNDNCMCKCALMLTGGWWFDACGPSNLNGMFYTAGQNHGKLNGIKWHYFKGPSYSLRSTTMMIRPLDF

SEQ ID NO: 138 - protein, 404 aa, Artificial sequence
  A novel predicted alternative spliced variant protein product
MTVFLSFAFLAAILTHIGCSNQRRSPENSGRRYNRIQHGQCAYTFILPEHDGNCRESTTDQYNTNALQRDAPHVEPDFSSQKLQHLEHVMENYTQWLQKLENYIVENMKSEMAQIQQNAVQNHTATMLEIGTSLLSQTAEQTRKLTDVETQVLNQTSRLEIQLLENSLSTYKLEKQLLQQTNEILKIHEKNSLLEHKILEMEGKHKEELDTLKEEKENLQGLVTRQTYIIQELEKQLNRATTNNSVLQKQQLELMDTVHNLVNLCTKEGVLLKGGKREEEKPFRDCADVYQAGFNKSGIYTIYINNMPEPKKVFCNMDVNGGGWTVIQHREDGSLDFQRGWKEYKMGFGNPSGEYWLGNEFIFAITSQRQYMLRIELMDWEGNRAYSQYDRFHIGNEKQNYRMW

SEQ ID NO: 139 - protein, 226 aa, Artificial sequence
  A novel predicted alternative spliced variant protein product
MQPPPSLCGRALVALVLACGLSRIWGEERGFPPDRATPLLQTAEIMTPPTKTLWPKGSNASLARSLAPAEVPKGDRTAGSPPRTISPPPCQGPIEIKETFKYINTVVSCLVFVLGIIGNSTLLRIIYKNKCMRNGPNILIASLALGDLLHIVIDIPINVYKLLAEDWPFGAEMCKLVPFIQKASVGITVLSLCALSIDSFTRQQKIGGYSVSISACHWPSLHFFIH

SEQ ID NO: 140 - protein, 741 aa, Artificial sequence
  A novel predicted alternative spliced variant protein product
MRGVWPPPVSALLSALGVNFHSPRSGQRCWAARTQVEKRLVVLVVLLAAGLVACLAALGIQYQTRSPSVCLSEACVSVTSSILSSMDPTVDPCHDFFSYACGGWIKANPVPDGHSRWGTFSNLWEHNQAIIKHLLENSTASVSEAERKAQVYYRACMNETRIEELRAKPLMELIERLGGWNITGPWAKDNFQDTLQVVTAHYRTSPFFSVYVSADSKNSNSNVIQVDQSGLGLPSRDYYLNKTENEKVLTGYLNYMVQLGKLLGGGDEEAIRPQMQQILDFETALANITIPQEKRRDEELIYHKVTAAELQTLAPAINWLPFLNTIFYPVEINESEPIVVYDKEYLEQISTLINTTDRCLLNNYMIWNLVRKTSSFLDQRFQDADEKFMEVMYGTKKTCLPRWKFCVSDTENNLGFALGPMFVKATFAEDSKSIATEIILEIKKAFEESLSTLKWMDEETRKSAKEKADAIYNMIGYPNFIMDPKELDKVFNDYTAVPDLYFENAMRFFNFSWRVTADQLRKAPNRDQWSMTPPMVNAYYSPTKNEIVFPAGILQAPFYTRSSPKALNFGGIGVVVGHELTHAFDDQGREYDKDGNLRPWWKNSSVEAFKRQTECMVEQYSNYSVNGEPVNGRHTLGENIADNGGLKAAYRAYQNWVKKNGAEHSLPTLGLTNNQLFFLGFAQVWCSVRTPESSHEGLITDPHSPSRFRVIGSLSNSKEFSEHFRCPPGSPMNPPHKCEVW

SEQ ID NO: 141 - protein, 736 aa, Artificial sequence
  A novel predicted alternative spliced variant protein product
MNVALQELGAGSNVGFQKGTRQLLGSRTQLELVLAGASLLLAALLLGCLVALGVQYHRDPSHSTCLTEACIRVAGKILESLDRGVSPCEDFYQFSCGGWIRRNPLPDGRSRWNTFNSLWDQNQAILKHLLENTTFNSSSEAEQKTQRFYLSCLQVERIEELGAQPLRDLIEKIGGWNITGPWDQDNFMEVLKAVAGTYRATPFFTVYISADSKSSNSNVIQVDQSGLFLPSRDYYLNRTANEKVLTAYLDYMEELGMLLGGRPTSTREQMQQVLELEIQLANITVPQDQRRDEEKIYHKMSISELQALAPSMDWLEFLSFLLSPLELSDSEPVVVYGMDYLQQVSELINRTEPSILNNYLIWNLVQKTTSSLDRRFESAQEKLLETLYGTKKSCVPRWQTCISNTDDALGFALGSLFVKATFDRQSKEIAEGMISEIRTAFEEALGQLVWMDEKTRQAAKEKADAIYDMIGFPDFILEPKELDDVYDGYEISEDSFFQNMLNLYNFSAKVMADQLRKPPSRDQWSMTPQTVNAYYLPTKNEIVFPAGILQAPFYARNHPKALNFGGIGVVMGHELTHAFDDQGREYDKEGNLRPWWQNESLAAFRNHTACMEEQYNQYQVNGERLNGRQTLGENIADNGGLKAAYNAYKAWLRKHGEEQQLPAVGLTNHQLFFVGFAQVWCSVRTPESSHEGLVTDPHSPARFRVLGTLSNSRDFLRHFGCPVGSPMNPGQLCEVW

SEQ ID NO: 142 - protein, 702 aa, Artificial sequence
  A novel predicted alternative spliced variant protein product
MNVALQELGAGSNMVEYKRATLRDEDAPETPVEGGASPDAMEVGFQKGTRQLLGSRTQLELVLAGASLLLAALLLGCLVALGVQYHRDPSHSTCLTEACIRVAGKILESLDRGVSPCEDFYQFSCGGWIRRNPLPDGRSRWNTFNSLWDQNQAILKHLLENTTFNSSSEAEQKTQRFYLSCLQVERIEELGAQPLRDLIEKIGGWNITGPWDQDNFMEVLKAVAGTYRATPFFTVYISADSKSSNSNVIQVDQSGLFLPSRDYYLNRTANEKALAPSMDWLEFLSFLLSPLELSDSEPVVVYGMDYLQQVSELINRTEPSILNNYLIWNLVQKTTSSLDRRFESAQEKLLETLYGTKKSCVPRWQTCISNTDDALGFALGSLFVKATFDRQSKEIAEGMISEIRTAFEEALGQLVWMDEKTRQAAKEKADAIYDMIGFPDFILEPKELDDVYDGYEISEDSFFQNMLNLYNFSAKVMADQLRKPPSRDQWSMTPQTVNAYYLPTKNEIVFPAGILQAPFYARNHPKALNFGGIGVVMGHELTHAFDDQGREYDKEGNLRPWWQNESLAAFRNHTACMEEQYNQYQVNGERLNGRQTLGENIADNGGLKAAYNAYKAWLRKHGEEQQLPAVGLTNHQLFFVGFAQVWCSVRTPESSHEGLVTDPHSPARFRVLGTLSNSRDFLRHFGCPVGSPMNPGQLCEVW

SEQ ID NO: 143 - protein, 732 aa, Artificial sequence
  A novel predicted alternative spliced variant protein product
MNVALQELGAGSNMVEYKRATLRDEDAPETPVEGGASPDAMEVGFQKGTRQLLGSRTQLELVLAGASLLLAALLLGCLVALGVQYHRDPSHSTCLTEACIRVAGKILESLDRGVSPCEDFYQFSCGGWIRRNPLPDGRSRWNTFNSLWDQNQAILKHLLENTTFNSSSEAEQKTQRFYLSCLQVERIEELGAQPLRDLIEKIGGWNITGPWDQDNFMEVLKAVAGTYRATPFFTVYISADSKSSNSNVIQVDQSGLFLPSRDYYLNRTANEKVLTAYLDYMEELGMLLGGRPTSTREQMQQVLELEIQLANITVPQDQRRDEEKIYHKMSISELQALAPSMDWLEFLSFLLSPLELSDSEPVVVYGMDYLQQVSELINRTEPSILNNYLIWNLVQKTTSSLDRRFESAQEKLLETLYGTKKSCVPRWQTCISNTDDALGFALGSLFVKATFDRQSKEIADAIYDMIGFPDFILEPKELDDVYDGYEISEDSFFQNMLNLYNFSAKVMADQLRKPPSRDQWSMTPQTVNAYYLPTKNEIVFPAGILQAPFYARNHPKALNFGGIGVVMGHELTHAFDDQGREYDKEGNLRPWWQNESLAAFRNHTACMEEQYNQYQVNGERLNGRQTLGENIADNGGLKAAYNAYKAWLRKHGEEQQLPAVGLTNHQLFFVGFAQVWCSVRTPESSHEGLVTDPHSPARFRVLGTLSNSRDFLRHFGCPVGSPMNPGQLCEVW

SEQ ID NO: 144 - protein, 739 aa, Artificial sequence
  A novel predicted alternative spliced variant protein product
MNVALQELGAGSNMVEYKRATLRDEDAPETPVEGGASPDAMEVGFQKGTRQLLGSRTQLELVLAGASLLLAALLLGCLVALGVQYHRDPSHSTCLTEACIRVAGKILESLDRGVSPCEDFYQFSCGGWIRRNPLPDGRSRWNTFNSLWDQNQAILKHLLENTTFNSSSEAEQKTQRFYLSCLQVERIEELGAQPLRDLIEKIGGWNITGPWDQDNFMEVLKAVAGTYRATPFFTVYISADSKSSNSNVIQVDQSGLFLPSRDYYLNRTANEKVLTAYLDYMEELGMLLGGRPTSTREQMQQVLELEIQLANITVPQDQRRDEEKIYHKMSISELQALAPSMDWLEFLSFLLSPLELSDSEPVVVYGMDYLQQVSELINRTEPSILNNYLIWNLVQKTTSSLDRRFESAQEKLLETLYGTKKSCVPRWQTCISNTDDALGFALGSLFVKATFDRQSKEIAEGMISEIRTAFEEALGQLVWMDEKTRQAAKEKYEISEDSFFQNMLNLYNFSAKVMADQLRKPPSRDQWSMTPQTVNAYYLPTKNEIVFPAGILQAPFYARNHPKALNFGGIGVVMGHELTHAFDDQGREYDKEGNLRPWWQNESLAAFRNHTACMEEQYNQYQVNGERLNGRQTLGENIADNGGLKAAYNAYKAWLRKHGEEQQLPAVGLTNHQLFFVGFAQVWCSVRTPESSHEGLVTDPHSPARFRVLGTLSNSRDFLRHFGCPVGSPMNPGQLCEVW

SEQ ID NO: 145 - protein, 728 aa, Artificial sequence
  A novel predicted alternative spliced variant protein product
MNVALQELGAGSNMVEYKRATLRDEDAPETPVEGGASPDAMEVGFQKGTRQLLGSRTQLELVLAGASLLLAALLLGCLVALGVQYHRDPSHSTCLTEACIRVAGKILESLDRGVSPCEDFYQFSCGGWIRRNPLPDGRSRWNTFNSLWDQNQAILKHLLENTTFNSSSEAEQKTQRFYLSCLQVERIEELGAQPLRDLIEKIGGWNITGPWDQDNFMEVLKAVAGTYRATPFFTVYISADSKSSNSNVIQVDQSGLFLPSRDYYLNRTANEKVLTAYLDYMEELGMLLGGRPTSTREQMQQVLELEIQLANITVPQDQRRDEEKIYHKMSISELQALAPSMDWLEFLSFLLSPLELSDSEPVVVYGMDYLQQVSELINRTEPSILNNYLIWNLVQKTTSSLDRRFESAQEKLLETLYGTKKSCVPRWQTCISNTDDALGFALGSLFVKATFDRQSKEIAEGMISEIRTAFEEALGQLVWMDEKTRQAAKEKADAIYDMIGFPDFILEPKELDDVYDGYEISEDSFFQNMLNLYNFSAKVMADQLRKPPSRDQALNFGGIGVVMGHELTHAFDDQGREYDKEGNLRPWWQNESLAAFRNHTACMEEQYNQYQVNGERLNGRQTLGENIADNGGLKAAYNAYKAWLRKHGEEQQLPAVGLTNHQLFFVGFAQVWCSVRTPESSHEGLVTDPHSPARFRVLGTLSNSRDFLRHFGCPVGSPMNPGQLCEVW

SEQ ID NO: 146 - protein, 117 aa, Artificial sequence
  A novel predicted alternative spliced variant protein product
MARALCPLQALWLLEWVLLLLGPCAAPPAWALNLDPVQLTFYAGPNGSQFGFSLDFHKDSHGRVAIVVGAPRTLGPSQEETGGVFLCPWRAEGGQCPSLLFDLRLRPLAALERPRKD

SEQ ID NO: 147 - protein, 34 aa, Artificial sequence
  A novel predicted alternative spliced variant protein product
MPSWALFMVTSCLLLAPQNLAQVSSQGRSPVLAP

SEQ ID NO: 148 - protein, 17 aa, Artificial sequence
  A novel predicted alternative spliced variant protein product
MATSNLLKGCACSLSLG

SEQ ID NO: 149 - protein, 662 aa, Artificial sequence
  A novel predicted alternative spliced variant protein product
MGKQGSNKKSNVEDSIVRKLMLDTWNESIFSNIKNRLQDSAMKLVHAERLGEAFDSQLVIGVRESYVNLCSNPEDKLQIYRDNFEKAYLDSTERFYRTQAPSYLQQNGVQNYMKYADAKLKEEEKRALRYLETRRECNSVEALMECCVNALVTSFKETILAECQGMIKRNETEKLHLMFSLMDKVPNGIEPMLKDLEEHIISAGLADMVAAAETITTDSEKYVEQLLTLFNRFSKLVKEAFQDDPRFLTARDKAYKAVVNDATIFKLELPLKQKGVGLKTQPESKCPELLANYCDMLLRKTPLSKKLTSEEIEAKLKEVLLVLKYVQNKDVFMRYHKAHLTRRLILDISADSEIEENMVEWLREVGMPADYVNKLARMFQDIKVSEDLNQAFKEMHKNNKLALPADSVNIKILNAGAWSRSSEKVFVSLPTELEDLIPEVEEFYKKNHSGRKLHWHHLMSNGIITFKNEVGQYDLEVTTFQLAVLFAWNQRPREKISFENLKLATELPDAELRRTLWSLVAFPKLKRQVLLYEPQVNSPKDFTEGTLFSVNQEFSLIKNAKVQKRGKINLIGRLQLTTERMREEENEGIVQLRILRTQEAIIQIMKMRKKISNAQLQTELVEILKNMFLPQKKMIKEQIEWLIEHKYIRRDESDINTFIYMA

SEQ ID NO: 150 - protein, 263 aa, Artificial sequence
  A novel predicted alternative spliced variant protein product
MATSNLLKNKGSLQFEDKWDFMRPIVLKLLRQESVTKQQWFDLFSDVHAVCLWDDKGPAKIHQALKEDILEFIKQAQARVLSHQDDTALLKAYIVEWRKFFTQCDILPKPFCQLEITLMGKQGSNKKSNVEDSIVRKLMLDTWNESIFSNIKNRLQDSAMKLVHAERLGEAFDSQLVIGVRESYVNLCSNPEDKLQIYRDNFEKAYLDSTERFYRTQAPSYLQQNGVQNYMKYADAKLKEEEKRALRYLETRRECNSVEANYI

SEQ ID NO: 151 - protein, 380 aa, Artificial sequence [sequence omitted]

SEQ ID NO: 152 - protein, 263 aa, Artificial sequence
  A novel predicted alternative spliced variant protein product
MRVLCAFPEAMPSSNSRPPACLAPGALYLALLLHLSLSSQAGDRRPLPVDRAAGLKEKTLILLDVSTKNPVRTVNENFLSLQLDPSIIHDGWLDFLSSKRLVTLARGLSPAFLRFGGKRTDFLQFQNLRNPAKSRGGPGPDYYLKNYEDDIVRSDVALDKQKGCKIAQHPDVMLELQREKAAQMHLVLLKEQFSNTYSNLILTARSLDKLYNFADCSGLHLIFALNALRRNPNNSWNSSSALSLLKYSASKKYNISWELGNDS

SEQ ID NO: 153 - protein, 577 aa, Artificial sequence
  A novel predicted alternative spliced variant protein product
MRVLCAFPEAMPSSNSRPPACLAPGALYLALLLHLSLSSQAGDRRPLPVDRAAGLKEKTLILLDVSTKNPVRTVNENFLSLQLDPSIIHDGWLDFLSSKRLVTLARGLSPAFLRFGGKRTDFLQFQNLRNPAKSRGGPGPDYYLKNYEDDIVRSDVALDKQKGCKIAQHPDVMLELQREKAAQMHLVLLKEQFSNTYSNLILTARSLDKLYNFADCSGLHLIFALNALRRNPNNSWNSSSALSLLKYSASKKYNISWELGNEPNNYRTMHGRAVNGSQLGKDYIQLKSLLQPIRIYSRASLYGPNIGRPRKNVIALLDGHCYIDGRVVKVMDFLKTRLLDTLSDQIRKIQKVVNTYTPGKKIWLEGVVTTSAGGTNNLSDSYAAGFLWLNTLGMLANQGIDVVIRHSFFDHGYNHLVDQNFNPLPDYWLSLLYKRLIGPKVLAVHVAGLQRKPRPGRVIRDKLRIYAHCTNHHNHNYVRGSITLFIINLHRSRKKIKLAGTLRDKLVHQYLLQPYGQEGLKSKSVQLNGQPLVMVDDGTLPELKPRPLRAGRTLVIPPVTMGFFVVKNVNALACRYR

SEQ ID NO: 154 - protein, 351 aa, Artificial sequence
  A novel predicted alternative spliced variant protein product
MRVLCAFPEAMPSSNSRPPACLAPGALYLALLLHLSLSSQAGDRRPLPVDRAAGLKEKTLILLDVSTKNPVRTVNENFLSLQLDPSIIHDGWLDFLSSKRLVTLARGLSPAFLRFGGKRTDFLQFQNLRNPAKSRGGPGPDYYLKNYEDDIVRSDVALDKQKGCKIAQHPDVMLELQREKAAQMHLVLLKEQFSNTYSNLILTARSLDKLYNFADCSGLHLIFALNALRRNPNNSWNSSSALSLLKYSASKKYNISWELGNEPNNYRTMHGRAVNGSQLGKDYIQLKSLLQPIRIYSRASLYGPNIGRPRKNVIALLDGFMKVAGSTVDAVTWQQWLIHTLQERRFGLKVW

SEQ ID NO: 155 - protein, 379 aa, Artificial sequence
  A novel predicted alternative spliced variant protein product
MRVLCAFPEAMPSSNSRPPACLAPGALYLALLLHLSLSSQAGDRRPLPVDRAAGLKEKTLILLDVSTKNPVRTVNENFLSLQLDPSIIHDGWLDFLSSKRLVTLARGLSPAFLRFGGKRTDFLQFQNLRNPAKSRGGPGPDYYLKNYEDDIVRSDVALDKQKGCKIAQHPDVMLELQREKAAQMHLVLLKEQFSNTYSNLILTARSLDKLYNFADCSGLHLIFALNALRRNPNNSWNSSSALSLLKYSASKKYNISWELGNEPNNYRTMHGRAVNGSQLGKDYIQLKSLLQPIRIYSRASLYGPNIGRPRKNVIALLDGFMKVAGSTVDAVTWQHCYIDGRVVKVMDFLKTRLLDTLSDQIRKIQKMVEHFRIAGQSGH

SEQ ID NO: 156 - protein, 411 aa, Artificial sequence
  A novel predicted alternative spliced variant protein product
MRVLCAFPEAMPSSNSRPPACLAPGALYLALLLHLSLSSQAGDRRPLPVDRAAGLKEKTLILLDVSTKNPVRTVNENFLSLQLDPSIIHDGWLDFLSSKRLVTLARGLSPAFLRFGGKRTDFLQFQNLRNPAKSRGGPGPDYYLKNYEDDIVRSDVALDKQKGCKIAQHPDVMLELQREKAAQMHLVLLKEQFSNTYSNLILTARSLDKLYNFADCSGLHLIFALNALRRNPNNSWNSSSALSLLKYSASKKYNISWELGNEPNNYRTMHGRAVNGSQLGKDYIQLKSLLQPIRIYSRASLYGPNIGRPRKNVIALLDGFMKVAGSTVDAVTWQHCYIDGRVVKVMDFLKTRLLDTLSDQIRKIQKVVNTYTPGKKIWLEGVVTTSAGGTNNLSDSYAAGFTTGSLSSTSA

SEQ ID NO: 157 - protein, 565 aa, Artificial sequence
  A novel predicted alternative spliced variant protein product
MRVLCAFPEAMPSSNSRPPACLAPGALYLALLLHLSLSSQAGDRRPLPVDRAAGLKEKTLILLDVSTKNPVRTVNENFLSLQLDPSIIHDGWLDFLSSKRLVTLARGLSPAFLRFGGKRTDFLQFQNLRNPAKSRGGPGPDYYLKNYEDDIVRSDVALDKQKGCKIAQHPDVMLELQREKAAQMHLVLLKEQFSNTYSNLILTARSLDKLYNFADCSGLHLIFALNALRRNPNNSWNSSSALSLLKYSASKKYNISWELGNEPNNYRTMHGRAVNGSQLGKDYIQLKSLLQPIRIYSRASLYGPNIGRPRKNVIALLDGFMKVAGSTVDAVTWQHCYIDGRVVKVMDFLKTRLLDTLSDQIRKIQKVVNTYTPGKKIWLEGVVTTSAGGTNNLSDSYAAGFLWLNTLGMLANQGIDVVIRHSFFDHGYNHLVDQNFNPLPPQLRSWVHYTFYHQLASIKKENQAGWDSQRQAGSPVPAAALWAGGPKVQVSATEWPALSDGGRRDPPRIEAPPPSGRPDIGHPSSHHGLLCGQECQCFGLPLPISYPHTHGYQWACWAASTPPLQ

SEQ ID NO: 158 - protein, 544 aa, Artificial sequence
  A novel predicted alternative spliced variant protein product
MRVLCAFPEAMPSSNSRPPACLAPGALYLALLLHLSLSSQAGDRRPLPVDRAAGLKEKTLILLDVSTKNPVRTVNENFLSLQLDPSIIHDGWLDFLSSKRLVTLARGLSPAFLRFGGKRTDFLQFQNLRNPAKSRGGPGPDYYLKNYEDDIVRSDVALDKQKGCKIAQHPDVMLELQREKAAQMHLVLLKEQFSNTYSNLILTARSLDKLYNFADCSGLHLIFALNALRRNPNNSWNSSSALSLLKYSASKKYNISWELGNEPNNYRTMHGRAVNGSQLGKDYIQLKSLLQPIRIYSRASLYGPNIGRPRKNVIALLDGFMKVAGSTVDAVTWQHCYIDGRVVKVMDFLKTRLLDTLSDQIRKIQKVVNTYTPGKKIWLEGVVTTSAGGTNNLSDSYAAGFLWLNTLGMLANQGIDVVIRHSFFDHGYNHLVDQNFNPLPDYWLSLLYKRLIGPKVLAVHVAGLQRKPRPGRVIRDKLRIYAHCTNHHNKSVQLNGQPLVMVDDGTLPELKPRPLRAGRTLVIPPVTMGFFVVKNVNALACRYR

SEQ ID NO: 159 - protein, 695 aa, Artificial sequence
  A novel predicted alternative spliced variant protein product
GKSESQMDITDINTPKPKKKQRWTPLEISLSVLVLLLTIIAVTMIALYATYDDGICKSSDCIKSDVLQEPKTEDIVAVQKAKALYRSCINESAIDSRGGEPLLKLLPDIYGWPVATENWEQKYGASWTAEKAIAQLNSKYGKKVLINLFVGTDDKNSVNHVIHIDQPRLGLPSRDYYECTGIYKEACTAYVDFMISVARLIRQEERLPIDENQLALEMNKVMELEKEIANATAKPEDRNDPMLLYNKMTLAQIQNNFSLEINGKPFSWLNFTNEIMSTVNISITNEEDVVVYAPEYLTKLKPILTKYSARDLQNLMSWRFIMDLVSSLSRTYKESRNAFRKALYGTTSETATWRRCANYVNGNMENAVGRLYVEAAFAGESKHVVEDLIAQIREVFIQTLDDLTWMDAETKKRAEEKALAIKERIGYPDDIVSNDNKLNNEYLELNYKEDEYFENIIQNLKFSQSKQLKKLREKVDKDEWISGAAVVNAFYSSGRNQIVFPAGILQPPFFSAQQSNSLNYGGIGMVIGHEITHGFDDNGRNFNKDGDLVDWWTQQSASNFKEQSQCMVYQYGNFSWDLAGGQHLNGINTLGENIADNGGLGQAYRAYQNYIKKNGEEKLLPGLDLNHKQLFFLNFAQVWCGTYRPEYAVNSIKTDVHSPGNFRIIGTLQNSAEFSEAFHCRKNSYMNPEKKCRVW

SEQ ID NO: 160 - protein, 178 aa, Artificial sequence
  A novel predicted alternative spliced variant protein product
GKSESQMDITDINTPKPKKKQRWTPLEISLSVLVLLLTIIAVTMIALYATYDDGICKSSDCIKSAARLIQNMDATTEPCTDFFKYACGGWLKRNVIPETSSRYGNFDILRDELEVVLKDVLQEPKTEDIVAVQKAKALYRSCINESAIDSRGGEPLLKLLPDIYGWPVATENWEQKYD

SEQ ID NO: 161 - protein, 704 aa, Artificial sequence
  A novel predicted alternative spliced variant protein product
GKSESQMDITDINTPKPKKKQRWTPLEISLSVLVLLLTIIAVTMIALYATYDDGICKSSDCIKSAARLIQNMDATTEPCTDFFKYACGGWLKRNVIPETSSRYGNFDILRDELEVVLKDVLQEPKTEDIVAVQKAKALYRSCINESAIDSRGGEPLLKLLPDIYGWPVATENWEQKYGASWTAEKAIAQLNSKYGKKVLINLFVGTDDKNSVNHVIHIDQPRLGLPSRDYYECTGIYKEATAKPEDRNDPMLLYNKMTLAQIQNNFSLEINGKPFSWLNFTNEIMSTVNISITNEEDVVVYAPEYLTKLKPILTKYSARDLQNLMSWRFIMDLVSSLSRTYKESRNAFRKALYGTTSETATWRRCANYVNGNMENAVGRLYVEAAFAGESKHVVEDLIAQIREVFIQTLDDLTWMDAETKKRAEEKALAIKERIGYPDDIVSNDNKLNNEYLELNYKEDEYFENIIQNLKFSQSKQLKKLREKVDKDEWISGAAVVNAFYSSGRNQIVFPAGILQPPFFSAQQSNSLNYGGIGMVIGHEITHGFDDNGRNFNKDGDLVDWWTQQSASNFKEQSQCMVYQYGNFSWDLAGGQHLNGINTLGENIADNGGLGQAYRAYQNYIKKNGEEKLLPGLDLNHKQLFFLNFAQVWCGTYRPEYAVNSIKTDVHSPGNFRIIGTLQNSAEFSEAFHCRKNSYMNPEKKCRVW

SEQ ID NO: 162 - protein, 389 aa, Artificial sequence
  A novel predicted alternative spliced variant protein product
GKSESQMDITDINTPKPKKKQRWTPLEISLSVLVLLLTIIAVTMIALYATYDDGICKSSDCIKSAARLIQNMDATTEPCTDFFKYACGGWLKRNVIPETSSRYGNFDILRDELEVVLKDVLQEPKTEDIVAVQKAKALYRSCINESAIDSRGGEPLLKLLPDIYGWPVATENWEQKYGASWTAEKAIAQLNSKYGKKVLINLFVGTDDKNSVNHVIHIDQPRLGLPSRDYYECTGIYKEACTAYVDFMISVARLIRQEERLPIDENQLALEMNKVMELEKEIANATAKPEDRNDPMLLYNKMTLAQIQNNFSLEINGKRSSKFNVLEIHNGSCKQPQPNLQGVQKCFPQGPLWYNLRNSNLETLCKLCQWEYGKCCGEALCGSSICWRE

SEQ ID NO: 163 - protein, 410 aa, Artificial sequence
  A novel predicted alternative spliced variant protein product
GKSESQMDITDINTPKPKKKQRWTPLEISLSVLVLLLTIIAVTMIALYATYDDGICKSSDCIKSAARLIQNMDATTEPCTDFFKYACGGWLKRNVIPETSSRYGNFDILRDELEVVLKDVLQEPKTEDIVAVQKAKALYRSCINESAIDSRGGEPLLKLLPDIYGWPVATENWEQKYGASWTAEKAIAQLNSKYGKKVLINLFVGTDDKNSVNHVIHIDQPRLGLPSRDYYECTGIYKEACTAYVDFMISVARLIRQEERLPIDENQLALEMNKVMELEKEIANATAKPEDRNDPMLLYNKMTLAQIQNNFSLEINGKPFSWLNFTNEIMSTVNISITNEEDVVVYAPEYLTKLKPILTKYSARPFMVQPQKQQLGDVVQTMSMGIWKMLWGGFMWKQHLLERVNMWSRI

SEQ ID NO: 164 - protein, 529 aa, Artificial sequence
  A novel predicted alternative spliced variant protein product
GKSESQMDITDINTPKPKKKQRWTPLEISLSVLVLLLTIIAVTMIALYATYDDGICKSSDCIKSAARLIQNMDATTEPCTDFFKYACGGWLKRNVIPETSSRYGNFDILRDELEVVLKDVLQEPKTEDIVAVQKAKALYRSCINESAIDSRGGEPLLKLLPDIYGWPVATENWEQKYGASWTAEKAIAQLNSKYGKKVLINLFVGTDDKNSVNHVIHIDQPRLGLPSRDYYECTGIYKEACTAYVDFMISVARLIRQEERLPIDENQLALEMNKVMELEKEIANATAKPEDRNDPMLLYNKMTLAQIQNNFSLEINGKPFSWLNFTNEIMSTVNISITNEEDVVVYAPEYLTKLKPILTKYSARDLQNLMSWRFIMDLVSSLSRTYKESRNAFRKALYGTTSETATWRRCANYVNGNMENAVGRLYVEAAFAGESKHVVEDLIAQIREVFIQTLDDLTWMDAETKKRAEEKALAIKERIGYPDDIVSNDNKLNNEYLEVDKWSSCSQCILLFRKKSDSLPSRHSAAPLL

SEQ ID NO: 165 - protein, 252 aa, Artificial sequence
  A novel predicted alternative spliced variant protein product
MSVPSSLSQSAINANSHGGPALSLPLPLHAAHNQLLNAKLQATAVGPKDLRSAMGEGGGPEPGPANAKWLKEGQNQLRRAATAHRDQNRNVTLTLAEEASQEPEMAPLGPKGLIHLYSELELSAHNAANRGLRGPGLIISTQEQGPDEGEEKAAGEAEEEEEDDDDEEEEEDLSSPPGLPEPLESVEAPPRPQALTDGPREHSKSASLLFGMRNSAASDEDSSWATLSQGSPSYGSPEDTAHLDRFCSWRRL

SEQ ID NO: 166 - protein, 665 aa, Artificial sequence
  A novel predicted alternative spliced variant protein product
MSVPSSLSQSAINANSHGGPALSLPLPLHAAHNQLLNAKLQATAVGPKDLRSAMGEGGGPEPGPANAKWLKEGQNQLRRAATAHRDQNRNVTLTLAEEASQEPEMAPLGPKGLIHLYSELELSAHNAANRGLRGPGLIISTQEQGPDEGEEKAAGEAEEEEEDDDDEEEEEDLSSPPGLPEPLESVEAPPRPQALTDGPREHSKSASLLFGMRNSAASDEDSSWATLSQGSPSYGSPEDTDSFWNPNAFETDSDLPAGWMRVQDTSGTYYWHIPTGTTQWEPPGRASPSQGSSPQEESQLTWTGFAHGEGFEDGEFWKDEPSDEAPMELGLKEPEEGTLTFPAQSLSPEPLPQEEEKLPPRNTNPGIKGGWGEGKDLLLQLEDETLKLVEPQSQALLHAQPIISIRVWGVGRDSGRERDFAYVARDKLTQMLKCHVFRCEAPAKNIATSLHEICSKIMAERRNARCLVNGLSLDHSKLVDVPFQVEFPAPKNELVQKFQVYYLGNVPVAKPVGVDVINGALESVLSSSSREQWTPSHVSVAPATLTILHQQTEAVLGECRVRFLSFLAVGRDVHTFAFIMAAGPASFCCHMFWCEPNAASLSEAVQAACMLRYQKCLDARSQASTSCLPAPPAESVARRVGWTVRRGVQSLWGSLKPKRLGAHTP

SEQ ID NO: 167 - protein, 671 aa, Artificial sequence
  A novel predicted alternative spliced variant protein product
MSVPSSLSQSAINANSHGGPALSLPLPLHAAHNQLLNAKLQATAVGPKDLRSAMGEGGGPEPGPANAKWLKEGQNQLRRAATAHRDQNRNVTLTLAEEASQEPEMAPLGPKGLIHLYSELELSAHNAANRGLRGPGLIISTQEQGPDEGEEKAAGEAEEEEEDDDDEEEEEDLSSPPGLPEPLESVEAPPRPQALTDGPREHSKSASLLFGMRNSAASDEDSSWATLSQGSPSYGSPEDTDSFWNPNAFETDSDLPAGWMRVQDTSGTYYWHIPTGTTQWEPPGRASPSQGSSPQEESQLTWTGFAHGEGFEDGEFWKDEPSDEAPMELGLKEPEEGTLTFPAQSLSPEPLPQEEEKLPPRNTNPGIKCFAVRSLGWVEMTEEELAPGRSSVAVNNCIRQLSYHKNNLHDPMSGGWGEGKDLLLQLEDETLKLVEPQSQALLHAQPIISIRVWGVGRDSGREIMAERRNARCLVNGLSLDHSKLVDVPFQVEFPAPKNELVQKFQVYYLGNVPVAKPVGVDVINGALESVLSSSSREQWTPSHVSVAPATLTILHQQTEAVLGECRVRFLSFLAVGRDVHTFAFIMAAGPASFCCHMFWCEPNAASLSEAVQAACMLRYQKCLDARSQASTSCLPAPPAESVARRVGWTVRRGVQSLWGSLKPKRLGAHTP

SEQ ID NO: 168 - protein, 530 aa, Artificial sequence
  A novel predicted alternative spliced variant protein product
MSVPSSLSQSAINANSHGGPALSLPLPLHAAHNQLLNAKLQATAVGPKDLRSAMGEGGGPEPGPANAKWLKEGQNQLRRAATAHRDQNRNVTLTLAEEASQEPEMAPLGPKGLIHLYSELELSAHNAANRGLRGPGLIISTQEQGPDEGEEKAAGEAEEEEEDDDDEEEEEDLSSPPGLPEPLESVEAPPRPQALTDGPREHSKSASLLFGMRNSAASDEDSSWATLSQGSPSYGSPEDTDSFWNPNAFETDSDLPAGWMRVQDTSGTYYWHIPTGTTQWEPPGRASPSQGSSPQEESQLTWTGFAHGEGFEDGEFWKDEPSDEAPMELGLKEPEEGTLTFPAQSLSPEPLPQEEEKLPPRNTNPGIKCFAVRSLGWVEMTEEELAPGRSSVAVNNCIRQLSYHKNNLHDPMSGGWGEGKDLLLQLEDETLKLVEPQSQALLHAQPIISIRVWGVGRDSGRERDFAYVARDKLTQMLKCHVFRCEAPAKNIATSLHEICSKWNSQRLRMSWSRSSKSITWGMYLLLNLLG

SEQ ID NO: 169 - protein, 639 aa, Artificial sequence
  A novel predicted alternative spliced variant protein product
MSVPSSLSQSAINANSHGGPALSLPLPLHAAHNQLLNAKLQATAVGPKDLRSAMGEGGGPEPGPANAKWLKEGQNQLRRAATAHRDQNRNVTLTLAEEASQEPEMAPLGPKGLIHLYSELELSAHNAANRGLRGPGLIISTQEQGPDEGEEKAAGEAEEEEEDDDDEEEEEDLSSPPGLPEPLESVEAPPRPQALTDGPREHSKSASLLFGMRNSAASDEDSSWATLSQGSPSYGSPEDTDSFWNPNAFETDSDLPAGWMRVQDTSGTYYWHIPTGTTQWEPPGRASPSQGSSPQEESQLTWTGFAHGEGFEDGEFWKDEPSDEAPMELGLKEPEEGTLTFPAQSLSPEPLPQEEEKLPPRNTNPGIKCFAVRSLGWVEMTEEELAPGRSSVAVNNCIRQLSYHKNNLHDPMSGGWGEGKDLLLQLEDETLKLVEPQSQALLHAQPIISIRVWGVGRDSGRERDFAYVARDKLTQMLKCHVFRCEAPAKNIATSLHEICSKIMAERRNARCLVNGLSLDHSKLVDVPFQVEFPAPKNELVQKFQVYYLGNVPVAKPVDRGSAGRVSGAFPLLPGRGQRCPHVCIHHGCRPSLLLLPHVLVRAQCCQPLRGCAGCVHASLPEVSGCPFPGLHLLPPSTPC

SEQ ID NO: 170 - protein, 50 aa, Artificial sequence
  A novel predicted alternative spliced variant protein product
MKLWDVVAVCLVLLHTASAFPLPAGKRPPEAPAEDRSLGRRRAPFALSSD

SEQ ID NO: 171 - protein, 341 aa, Artificial sequence
  A novel predicted alternative spliced variant protein product
MRPHLSPPLQQLLLPVLLACAAHSTGALPRLCDVLQVLWEEQDQCLQELSREQTGDLGTEQPVPGCEGMWDNISCWPSSVPGRMVEVECPRFLRMLTSRNGSLFRNCTQDGWSETFPRPNLACGVNVNDSSNEKRHSYLLKLKVMYTVGYSSSLVMLLVALGILCAFRRLHCTRNYIHMHLFVSFILRALSNFIKDAVLFSSDDVTYCDAHRAGCKLVMVLFQYCIMANYSWLLVEGLYLHTLLAISFFSERKYLQGFVAFGWGSPAIFVALWAIARHFLEDVGCWDINANASIWWIIRGPVILSILAPGQVHSPADPPLWHPLHRLRLLPRGRYGDPAVF

SEQ ID NO: 172 - protein, 136 aa, Artificial sequence
  A novel predicted alternative spliced variant protein product
MSKSLKKLVEESREKNQPEVDMSDRGISNMLDVNGLFTLSHITQLVLSHNKLTMVPPNIAELKNLEVLNFFNNQIEELPTQISSLQKLKHLNLGMNRLNTLPRGFGSLPALEVLDLTYNNLSENSLPGNFFYLTQP

SEQ ID NO: 173 - protein, 488 aa, Artificial sequence
  A novel predicted alternative spliced variant protein product
MNCRELPLTLWVLISVSTAESCTSRPHITVVEGEPFYLKHCSCSLAHEIETTTKSWYKSSGSQEHVELNPRSSSRIALHDCVLEFWPVELNDTGSYFFQMKNYTQKWKLNVIRRNKHSCFTERQVTSKIVEVKKFFQITCENSYYQTLVNSTSLYKNCKKLLLENNKNPTIKKNAEFEDQGYYSCVHFLHHNGKLFNITKTFNITIVEDRSNIVPVLLGPKLNHVAVELGKNVRLNCSALLNEEDVIYWMFGEENGSDPNIHEEKEMRIMTPEGKWHASKVLRIENIGESNLNVLYNCTVASTGGTDTKSFILVRKADMADIPGHVFTRGMIIAVLILVAVVCLVTVCVIYRVDLVLFYRHLTRRDETLTAVVDEIHSLIEKSRRLIIVLSKSYMSNEVRYELESGLHEALVERKIKIILIEFTPVTDFTFLPQSLKLLKSHRVLKWKADKSLSYNSRFWKNLLYLMPAKTVKPGRDEPEVLPVLSES

SEQ ID NO: 174 - protein, 270 aa, Artificial sequence
  A novel predicted alternative spliced variant protein product
MHYCVLSAFLILHLVTVALSLSTCSTLDMDQFMRKRIEAIRGQILSKLKLTSPPEDYPEPEEVPPEVISIYNSTRDLLQEKASRRAAACERERSDEEYYAKEVYKIDMPPFFPSENAIPPTFYRPYFRIVRFDVSAMEKNASNLVKAEFRVFRLQNPKARVPEQRIELYQILKSKDLTSPTQRYIDSKVVKTRAEGEWLSFDVTDAVHEWLHHKDRNLGFKISLHCPCCTFVPSNNYIIPNKSEELEARFAEMCRIIAAYVHFTLISRGI

SEQ ID NO: 175 - protein, 2050 aa, Artificial sequence
  A novel predicted alternative spliced variant protein product
MFNLMKKDKDKDGGRKEKKEKKEKKERMSAAELRSLEEMSLRRGFFNLNRSSKRESKTRLEISNPIPIKVASGSDLHLTDIDSDSNRGSVILDSGHLSTASSSDDLKGEEGSFRGSVLQRAAKFGSLAKQNSQMIVKRFSFSQRSRDESASETSTPSEHSAAPSPQVEVRTLEGQLVQHPGPGIPRPGHRSRAPELVTKKFPVDLRLPPVVPLPPPTLRELELQRRPTGDFGFSLRRTTMLDRGPEGQACRRVVHFAEPGAGTKDLALGLVPGDRLVEINGHNVESKSRDEIVEMIRQSGDSVRLKVQPIPELSELSRSWLRSGEGPRREPSDAKTEEQIAAEEAWNETEKVWLVHRDGFSLASQLKSEELNLPEGKVRVKLDHDGAILDVDEDDVEKANAPSCDRLEDLASLVYLNESSVLHTLRQRYGASLLHTYAGPSLLVLGPRGAPAVYSEKVMHMFKGCRREDMAPHIYAVAQTAYRAMLMSRQDQSIILLGSSGSGKTTSCQHLVQYLATIAGISGNKVFSVEKWQALYTLLEAFGNSPTIINGNATRFSQILSLDFDQAGQVASASIQTMLLEKLRVARRPASEATFNVFYYLLACGDGTLRTELHLNHLAENNVFGIVPLAKPEEKQKAAQQFSKLQAAMKVLGISPDEQKACWFILAAIYHLGAAGATKAGRKQFARHEWAQKAAYLLGCSLEELSSAIFKHQHKGGTLQRSTSFRQGPEESGLGDGTGPKLSALECLEGMAAGLYSELFTLLVSLVNRALKSSQHSLCSMMIVDTPGFQNPEQGGSARGASFEELCHNYTQDRLQRLFHERTFVQELERYKEENIELAFDDLEPPTDDSVAAVDQASHQSLVRSLARTDEARGLLWLLEEEALVPGASEDTLLERLFSYYGPQEGDKKGQSPLLHSSKPHHFLLGHSHGTNWVEYNVTGWLNYTKQNPATQNAPRLLQDSQKKIISNLFLGRAGSATVLSGSIAGLEGGSQLALRRATSMRKTFTTGMAAVKKKSLCIQMKLQVDALIDTIKKSKLHFVHCFLPVAEGWAGEPRSASSRRVSSSSELDLPSGDHCEAGLLQLDVPLLRTQLRGSRLLDAMRMYRQGYPDHMVFSEFRRRFDVLAPHLTKKHGRNYIVVDERRAVEELLECLDLEKSSCCMGLSRVFFRAGTLARLEEQRDEQTSRNLTLFQAACRGYLARQHFKKRKIQDLAIRCVQKNIKKNKGVKDWPWWKLFTTVRPLIEVQLSEEQIRNKDEEIQQLRSKLEKAEKERNELRLNSDRLESRISELTSELTDERNTGESASQLLDAETAERLRAEKEMKELQTQYDALKKQMEVMEMEVMEARLIRAAEINGEVDDDDAGGEWRLKYERAVREVDFTKKRLQQEFEDKLEVEQQNKRQLERRLGDLQADSEESQRALQQLKKKCQRLTAELQDTKLHLEGQQVRNHELEKKQRRFDSELSQAHEEAQREKLQREKLQREKDMLLAEAFSLKQQLEEKDMDIAGFTQKVVSLEAELQDISSQESKDEASLAKVKKQLRDLEAKVKDQEEELDEQAGTIQMLEQAKLRLEMEMERMRQTHSKEMESRDEEVEEARQSCQKKLKQMEVQLEEEYEDKQKVLREKRELEGKLATLSDQVNRRDFESEKRLRKDLKRTKALLADAQLMLDHLKNSAPSKREIAQLKNQLEESEFTCAAAVKARKAMEVEIEDLHLQIDDIAKAKTALEEQLSRLQREKNEIQNRLEEDQEDMNELMKKHKAAVAQASRDLAQINDLQAQLEEANKEKQELQEKLQALQSQVEFLEQSMVDKSLVSRQEAKIRELETRLEFERTQVKRLESLASRLKENMEKLTEERDQRIAAENREKEQNKRLQRQLRDTKEEMGELARKEAEASRKKHELEMDLESLEAANQSLQADLKLAFKRIGDLQAAIEDEMESDENEDLINSLQDMVTKYQKRKNKLEGDSDVDSELEDRVDGVKSWLSKNKGPSKAASDDGSLKSSSPTSYWKSLAPDRSDDEHDPLDNTSRPRYSHSYLSDSDTEAKLTETNA

SEQ ID NO: 176 - protein, 2014 aa, Artificial sequence
  A novel predicted alternative spliced variant protein product
MFNLMKKDKDKDGGRKEKKEKKEKKERMSAAELRSLEEMSLRRGFFNLNRSSKRESKTRLEISNPIPIKVASGSDLHLTDIDSDSNRGSVILDSGHLSTASSSDDLKGEEGSFRGSVLQRAAKFGSLAKQNSQMIVKRFSFSQRSRDESASETSTPSEHSAAPSPQVEVRTLEGQLVQHPGPGIPRPGHRSRAPELVTKKFPVDLRLPPVVPLPPPTLRELELQRRPTGDFGFSLRRTTMLDRGPEGQACRRVVHFAEPGAGTKDLALGLVPGDRLVEINGHNVESKSRDEIVEMIRQSGDSVRLKVQPIPELSELSRSWLRSGEGPRREPSDAKTEEQIAAEEAWNETEKVWLVHRDGFSLASQLKSEELNLPEGKVRVKLDHDGAILDVDEDDVEKANAPSCDRLEDLASLVYLNESSVLHTLRQRYGASLLHTYAGPSLLVLGPRGAPAVYSEKVMHMFKGCRREDMAPHIYAVAQTAYRAMLMSRQDQSIILLGSSGSGKTTSCQHLVQYLATIAGISGNKVFSVEKWQALYTLLEAFGNSPTIINGNATRFSQILSLDFDQAGQVASASIQTMLLEKLRVARRPASEATFNVFYYLLACGDGTLRTELHLNHLAENNVFGIVPLAKPEEKQKAAQQFSKLQAAMKVLGISPDEQKACWFILAAIYHLGAAGATKEAAEAGRKQFARHEWAQKAAYLLGCSLEELSSAIFKHQHKGGTLQRSTSFRQGPEESGLGDGTGPKLSALECLEGMAAGLYSELFTLLVSLVNRALKSSQHSLCSMMIVDTPGFQNPEQGGSARGASFEELCHNYTQDRLQRLFHERTFVQELERYKEENIELAFDDLEPPTDDSVAAVDQASHQSLVRSLARTDEARGLLWLLEEEALVPGASEDTLLERLFSYYGPQEGDKKGQSPLLHSSKPHHFLLGHSHGTNWVEYNVTGWLNYTKQNPATQNAPRLLQDSQKKIISNLFLGRAGSATVLSGSIAGLEGGSQLALRRATSMRKTFTTGMAAVKKKSLCIQMKLQVDALIDTIKKSKLHFVHCFLPVAEGWAGEPRSASSRRVSSSSELDLPSGDHCEAGLLQLDVPLLRTQLRGSRLLDAMRMYRQGYPDHMVFSEFRRRFDVLAPHLTKKHGRNYIVVDERRAVEELLECLDLEKSSCCMGLSRVFFRAGTLARLEEQRDEQTSRNLTLFQAACRGYLARQHFKKRKIQDLAIRCVQKNIKKNKGVKDWPWWKLFTTVRPLIEVQLSEEQIRNKDEEIQQLRSKLEKAEKERNELRLNSDRLESRTQYDALKKQMEVMEMEVMEARLIRAAEINGEVDDDDAGGEWRLKYERAVREVDFTKKRLQQEFEDKLEVEQQNKRQLERRLGDLQADSEESQRALQQLKKKCQRLTAELQDTKLHLEGQQVRNHELEKKQRRFDSELSQAHEEAQREKLQREKLQREKDMLLAEAFSLKQQLEEKDMDIAGFTQKVVSLEAELQDISSQESKDEASLAKVKKQLRDLEAKVKDQEEELDEQAGTIQMLEQAKLRLEMEMERMRQTHSKEMESRDEEVEEARQSCQKKLKQMEVQLEEEYEDKQKVLREKRELEGKLATLSDQVNRRDFESEKRLRKDLKRTKALLADAQLMLDHLKNSAPSKREIAQLKNQLEESEFTCAAAVKARKAMEVEIEDLHLQIDDIAKAKTALEEQLSRLQREKNEIQNRLEEDQEDMNELMKKHKAAVAQASRDLAQINDLQAQLEEANKEKQELQEKLQALQSQVEFLEQSMVDKSLVSRQEAKIRELETRLEFERTQVKRLESLASRLKENMEKLTEERDQRIAAENREKEQNKRLQRQLRDTKEEMGELARKEAEASRKKHELEMDLESLEAANQSLQADLKLAFKRIGDLQAAIEDEMESDENEDLINSLQDMVTKYQKRKNKLEGDSDVDSELEDRVDGVKSWLSKNKGPSKAASDDGSLKSSSPTSYWKSLAPDRSDDEHDPLDNTSRPRYSHSYLSDSDTEAKLTETNA

SEQ ID NO: 177 - protein, 2016 aa, Artificial sequence
  A novel predicted alternative spliced variant protein product
MFNLMKKDKDKDGGRKEKKEKKEKKERMSAAELRSLEEMSLRRGFFNLNRSSKRESKTRLEISNPIPIKVASGSDLHLTDIDSDSNRGSVILDSGHLSTASSSDDLKGEEGSFRGSVLQRAAKFGSLAKQNSQMIVKRFSFSQRSRDESASETSTPSEHSAAPSPQVEVRTLEGQLVQHPGPGIPRPGHRSRAPELVTKKFPVDLRLPPVVPLPPPTLRELELQRRPTGDFGFSLRRTTMLDRGPEGQACRRVVHFAEPGAGTKDLALGLVPGDRLVEINGHNVESKSRDEIVEMIRQSGDSVRLKVQPIPELSELSRSWLRSGEGPRREPSDAKTEEQIAAEEAWNETEKVWLVHRDGFSLASQLKSEELNLPEGKVRVKLDHDGAILDVDEDDVEKANAPSCDRLEDLASLVYLNESSVLHTLRQRYGASLLHTYAGPSLLVLGPRGAPAVYSEKVMHMFKGCRREDMAPHIYAVAQTAYRAMLMSRQDQSIILLGSSGSGKTTSCQHLVQYLATIAGISGNKVFSVEKWQALYTLLEAFGNSPTIINGNATRFSQILSLDFDQAGQVASASIQTMLLEKLRVARRPASEATFNVFYYLLACGDGTLRTELHLNHLAENNVFGIVPLAKPEEKQKAAQQFSKLQAAMKVLGISPDEQKACWFILAAIYHLGAAGATKEAAEAGRKQFARHEWAQKAAYLLGCSLEELSSAIFKHQHKGGTLQRSTSFRQGPEESGLGDGTGPKLSALECLEGMAAGLYSELFTLLVSLVNRALKSSQHSLCSMMIVDTPGFQNPEQGGSARGASFEELCHNYTQDRLQRLFHERTFVQELERYKEENIELAFDDLEPPTDDSVAAVDQASHQSLVRSLARTDEARGLLWLLEEEALVPGASEDTLLERLFSYYGPQEGDKKGQSPLLHSSKPHHFLLGHSHGTNWVEYNVTGWLNYTKQNPATQNAPRLLQDSQKKIISNLFLGRAGSATVLSGSIAGLEGGSQLALRRATSMRKTFTTGMAAVKKKSLCIQMKLQVDALIDTIKKSKLHFVHCFLPVAEGWAGEPRSASSRRVSSSSELDLPSGDHCEAGLLQLDVPLLRTQLRGSRLLDAMRMYRQGYPDHMVFSEFRRRFDVLAPHLTKKHGRNYIVVDERRAVEELLECLDLEKSSCCMGLSRVFFRAGTLARLEEQRDEQTSRNLTLFQAACRGYLARQHFKKRKIQDLAIRCVQKNIKKNKGVKDWPWWKLFTTVRPLIEVQLSEEQIRNKDEEIQQLRSKLEKAEKERNELRLNSDRLESRISELTSELTDERNTGESASQLLDAETAERLRAEKEMKELQTQYDALKKQMEVMEMEVMEARLIRAAEINGEVDDDDAGGEWRLKYERAVREVDFTKKRLQQEFEDKLEVEQQNKRQLERRLGDLQADSEESQRALQQLKKKCQRLTAELQDTKLHLEGQQVRNHELEKKQRRFDSELSQAHEEAQREKLQREKLQREKDMLLAEAFSLKQQLEEKDMDIAGFTQKVVSLEAELQDISSQESKDEASLAKVKKQLRDLEAKVKDQEEELDEQAGTIQMLEQAKLRLEMEMERMRQTHSKEMESRDEEVEEARQSCQKKLKQMEVQLEEEYEDKQKVLREKRELEGKLATLSDQVNRRDFESEKRLRKDLKRTKALLADAQLMLDHLKNSAPSKREIAQLKNQLEEQLSRLQREKNEIQNRLEEDQEDMNELMKKHKAAVAQASRDLAQINDLQAQLEEANKEKQELQEKLQALQSQVEFLEQSMVDKSLVSRQEAKIRELETRLEFERTQVKRLESLASRLKENMEKLTEERDQRIAAENREKEQNKRLQRQLRDTKEEMGELARKEAEASRKKHELEMDLESLEAANQSLQADLKLAFKRIGDLQAAIEDEMESDENEDLINSLQDMVTKYQKRKNKLEGDSDVDSELEDRVDGVKSWLSKNKGPSKAASDDGSLKSSSPTSYWKSLAPDRSDDEHDPLDNTSRPRYSHSYLSDSDTEAKLTETNA

SEQ ID NO: 178 - protein, 522 aa, Artificial sequence
  A novel predicted alternative spliced variant protein product
MTLLWCVVSLYFYGILQSDASERCDDWGLDTMRQIQVFEDEPARIKCPLFEHFLKFNYSTAHSAGLTLIWYWTRQDRDLEEPINFRLPENRISKEKDVLWFRPTLLNDTGNYTCMLRNTTYCSKVAFPLEVVQKDSCFNSPMKLPVHKLYIEYGIQRITCPNVDGYFPSSVKPTITWYMGCYKIQNFNNVIPEGMNLSFLIALISNNGNYTCVVTYPENGRTFHLTRTLTVKVVGSPKNAVPPVIHSPNDHVVYEKEPGEELLIPCTVYFSFLMDSRNEVWWTIDGKKPDDITIDVTINESISHSRTEDETRTQILSIKKVTSEDLKRSYVCHARSAKGEVAKAAKVKQKVPAPRYTVELACGFGATVLLVVILIVVYHVYWLEMVLFYRAHFGTDETILVVTDETLSFIQKSRRLLVVLSPNYVLQGTQALLELKAGLENMASRGNINVILVQYKAVKETKVKELKRAKTVLTVIKWKGEKSKYPQGRFWKQLQVAMPVKKSPRRSSSDEQGLSYSSLKNV

SEQ ID NO: 179 - protein, 140 aa, Artificial sequence
  A novel predicted alternative spliced variant protein product
  misc_feature (21)..(21): Xaa can be any naturally occurring amino acid
MKAPIPHLILLYATFTQSLKXVTKRGSADGCTDWSIDIKKYQVLVGEPVRIKCALFYGYIRTNYSLAQSAGLSLMWYKSSGPGDFEEPIAFDGSRMSKEEDSIWFRPTLLQDSGLYACVIRNAGQKHGGQVLYSKEILCL

SEQ ID NO: 180 - protein, 185 aa, Artificial sequence
  A novel predicted alternative spliced variant protein product
  misc_feature (21)..(21): Xaa can be any naturally occurring amino acid
MKAPIPHLILLYATFTQSLKXVTKRGSADGCTDWSIDIKKYQVLVGEPVRIKCALFYGYIRTNYSLAQSAGLSLMWYKSSGPGDFEEPIAFDGSRMSKEEDSIWFRPTLLQDSGLYACVIRNSTYCMKVSISLTVGENDTGLCYNSKMKYFEKAELSKSKEISCRDIEDFLLPTREPEILWYKPL

SEQ ID NO: 181 - protein, 671 aa, Artificial sequence
  A novel predicted alternative spliced variant protein product
  misc_feature (21)..(21): Xaa can be any naturally occurring amino acid
MKAPIPHLILLYATFTQSLKXVTKRGSADGCTDWSIDIKKYQVLVGEPVRIKCALFYGYIRTNYSLAQSAGLSLMWYKSSGPGDFEEPIAFDGSRMSKEEDSIWFRPTLLQDSGLYACVIRNSTYCMKVSISLTVGENDTGLCYNSKMKYFEKAELSKSKEISCRDIEDFLLPTREPEILWYKECRTKTWRPSIVFKRDTLLIREVREDDIGNYTCELKYGGFVVRRTTELTVTGDSANLTCRAFFGYSGDVSPLIYWMKGEKFIEDLDENRVWESDIRILKEHLGEQEVSISLIVDSVEEGDLGNYSCYVENGNGRRHASVLLHKRELMYTVELAGGLGAILLLLVCLVTIYKCYKIEIMLFYRNHFGAEELDGDNKDYDAYLSYTKVDPDQWNQETGEEERFALEILPDMLEKHYGYKLFIPDRDLIPTGTYIEDVARCVDQSKRLIIVMTPNYVVRRGWSIFELETRLRNMLVTGEIKVILIECSELRGIMNYQEVEALKHTIKLLTVIKWHGPKCNKLNSKFWKRLQYEMPFKRIEPITHEQALDVSEQGPFGELQTVSAISMAAATSTALATAHPDLRSTFHNTYHSQMRQKHYYRSYEYDVPPTGTLPLTSIGNQHTYCNIPMTLINGQRPQTKSSREQNPDEAHTNSAILPLLPRETSISSVIW

SEQ ID NO: 182 - protein, 274 aa, Artificial sequence
  A novel predicted alternative spliced variant protein product
  misc_feature (21)..(21): Xaa can be any naturally occurring amino acid
MKAPIPHLILLYATFTQSLKXVTKRGSADGCTDWSIDIKKYQVLVGEPVRIKCALFYGYIRTNYSLAQSAGLSLMWYKSSGPGDFEEPIAFDGSRMSKEEDSIWFRPTLLQDSGLYACVIRNSTYCMKVSISLTVGENDTGLCYNSKMKYFEKAELSKSKEISCRDIEDFLLPTREPEILWYKECRTKTWRPSIVFKRDTLLIREVREDDIGNYTCELKYGGFVVRRTTELTVTAPLTDKPPKLLYPMESKLTIQETQLEFLRSILGNRKFPSH

SEQ ID NO: 183 - protein, 325 aa, Artificial sequence
  A novel predicted alternative spliced variant protein product
  misc_feature (21)..(21): Xaa can be any naturally occurring amino acid
MKAPIPHLILLYATFTQSLKXVTKRGSADGCTDWSIDIKKYQVLVGEPVRIKCALFYGYIRTNYSLAQSAGLSLMWYKSSGPGDFEEPIAFDGSRMSKEEDSIWFRPTLLQDSGLYACVIRNSTYCMKVSISLTVGENDTGLCYNSKMKYFEKAELSKSKEISCRDIEDFLLPTREPEILWYKECRTKTWRPSIVFKRDTLLIREVREDDIGNYTCELKYGGFVVRRTTELTVTAPLTDKPPKLLYPMESKLTIQETQLGDSANLTCRAFFGYSGDVSPLIYWMKGEKFIEDLDENRVWESDIRANVHSGTCCRPCCYSCCLYVW

SEQ ID NO: 184 - protein, 128 aa, Artificial sequence
  A novel predicted alternative spliced variant protein product
MKPPFLLALVVCSVVSTNLKMVSKRNSVDGCIDWSVDLKTYMALAGEPVRVKCALFYSYIRTNYSTAQSTGLRLMWYKNKGDLEEPIIFSEVRMSKEEDSIWFHSAEAQDSGFYTCVLRNASQKCGEA

SEQ ID NO: 185 - protein, 201 aa, Artificial sequence
  A novel predicted alternative spliced variant protein product
MKPPFLLALVVCSVVSTNLKMVSKRNSVDGCIDWSVDLKTYMALAGEPVRVKCALFYSYIRTNYSTAQSTGLRLMWYKNKGDLEEPIIFSEVRMSKEEDSIWFHSAEAQDSGFYTCVLRNSTYCMKVSMSLTVAENESGLCYNSRIRYLEKSEVTKRKEISCPDMDDFKKSDQEPDVVWYKLYSQTSLPSHCSPWRISQVL

SEQ ID NO: 186 - protein, 661 aa, Artificial sequence
  A novel predicted alternative spliced variant protein product
MKPPFLLALVVCSVVSTNLKMVSKRNSVDGCIDWSVDLKTYMALAGEPVRVKCALFYSYIRTNYSTAQSTGLRLMWYKNKGDLEEPIIFSEVRMSKEEDSIWFHSAEAQDSGFYTCVLRNSTYCMKVSMSLTVAENESGLCYNSRIRYLEKSEVTKRKEISCPDMDDFKKSDQEPDVVWYKECKPKMWRSIIIQKGNALLIQEVQEEDGGNYTCELKYEGKLVRRTTELKVTGKPLNIPCKAFFGFSGESGPMIYWMKGEKFIEELAGHIREGEIRLLKEHLGEKEVELALIFDSVVEADLANYTCHVENRNGRKHASVLLRKKDLIYKIELAGGLGAIFLLLVLLVVIYKCYNIELMLFYRQHFGADETNDDNKEYDAYLSYTKVDQDTLDCDNPEEEQFALEVLPDVLEKHYGYKLFIPERDLIPSGTYMEDLTRYVEQSRRLIIVLTPDYILRRGWSIFELESRLHNMLVSGEIKVILIECTELKGKVNCQEVESLKRSIKLLSLIKWKGSKSSKLNSKFWKHLVYEMPIKKKEMLPRCHVLDSAEQGLFGELQPIPSIAMTSTSATLVSSQADLPEFHPSDSMQIRHCCRGYKHEIPATTLPVPSLGNHHTYCNLPLTLLNGQLPLNNTLKDTQEFHRNSSLLPLSSKELSFTSDIW

SEQ ID NO: 187 - protein, 307 aa, Artificial sequence
  A novel predicted alternative spliced variant protein product
MKPPFLLALVVCSVVSTNLKMVSKRNSVDGCIDWSVDLKTYMALAGEPVRVKCALFYSYIRTNYSTAQSTGLRLMWYKNKGDLEEPIIFSEVRMSKEEDSIWFHSAEAQDSGFYTCVLRNSTYCMKVSMSLTVAENESGLCYNSRIRYLEKSEVTKRKEISCPDMDDFKKSDQEPDVVWYKECKPKMWRSIIIQKGNALLIQEVQEEDGGNYTCELKYEGKLVRRTTELKVTALLTDKPPKPLFPMENQPSVIDVQLGFSKSILEKKKLNWHSSLTQLWKLTWRIIPAMLKTEMDGNMPVFCCVKRI

SEQ ID NO: 188 - protein, 304 aa, Artificial sequence
  A novel predicted alternative spliced variant protein product
MKPPFLLALVVCSVVSTNLKMVSKRNSVDGCIDWSVDLKTYMALAGEPVRVKCALFYSYIRTNYSTAQSTGLRLMWYKNKGDLEEPIIFSEVRMSKEEDSIWFHSAEAQDSGFYTCVLRNSTYCMKVSMSLTVAENESGLCYNSRIRYLEKSEVTKRKEISCPDMDDFKKSDQEPDVVWYKECKPKMWRSIIIQKGNALLIQEVQEEDGGNYTCELKYEGKLVRRTTELKVTALLTDKPPKPLFPMENQPSVIDVQLGKPLNIPCKAFFGFSGESGPMIYWMKGEKFIEELAGHIREGEIRFNL

SEQ ID NO: 189 - protein, 221 aa, Artificial sequence
  A novel predicted alternative spliced variant protein product
MGLAWGLGVLFLMHVCGTNRIPESGGDNSVFDIFELTGAARKGSGRRLVKGPDPSSPAFRIEDANLIPPVPDDKFQDLVDAVRTEKGFLLLASLRQMKKTRGTLLALERKDHSGQVFSVVSNGKAGTLDLSLTVQGKQHVVSVEEALLATGQWKSITLFVQEDRAQLYIDCEKMENAELDVPIQSVFTRDLASIARLRIAKGGVNDNFQLPVSSSPLTTTW

SEQ ID NO: 190 - protein, 417 aa, Artificial sequence [sequence omitted]

SEQ ID NO: 191 - protein, 1112 aa, Artificial sequence
  A novel predicted alternative spliced variant protein product
MGLAWGLGVLFLMHVCGTNRIPESGGDNSVFDIFELTGAARKGSGRRLVKGPDPSSPAFRIEDANLIPPVPDDKFQDLVDAVRTEKGFLLLASLRQMKKTRGTLLALERKDHSGQVFSVVSNGKAGTLDLSLTVQGKQHVVSVEEALLATGQWKSITLFVQEDRAQLYIDCEKMENAELDVPIQSVFTRDLASIARLRIAKGGVNDNFQGVLQNVRFVFGTTPEDILRNKGCSSSTSVLLTLDNNVVNGSSPAIRTNYIGHKTKDLQAICGISCDELSSMVLELRGLRTIVTTLQDSIRKVTEENKELANELRRPPLCYHNGVQYRNNEEWTVDSCTECHCQNSVTICKKVSCPIMPCSNATVPDGECCPRCWFKQDGGWSHWSPWSSCSVTCGDGVITRIRLCNSPSPQMNGKPCEGEARETKACKKDACPINGGWGPWSPWDICSVTCGGGVQKRSRLCNNPTPQFGGKDCVGDVTENQICNKQDCPIDGCLSNPCFAGVKCTSYPDGSWKCGACPPGYSGNGIQCTDVDECKEVPDACFNHNGEHRCENTDPGYNCLPCPPRFTGSQPFGQGVEHATANKQVCKPRNPCTDGTHDCNKNAKCNYLGHYSDPMYRCECKPGYAGNGIICGEDTDLDGWPNENLVCVANATYHCKKDNCPNLPNSGQEDYDKDGIGDACDDDDDNDKIPDDRDNCPFHYNPAQYDYDRDDVGDRCDNCPYNHNPDQADTDNNGEGDACAADIDGDGILNERDNCQYVYNVDQRDTDMDGVGDQCDNCPLEHNPDQLDSDSDRIGDTCDNNQDIDEDGHQNNLDNCPYVPNANQADHDKDGKGDACDHDDDNDGIPDDKDNCRLVPNPDQKDSDGDGRGDACKDDFDHDSVPDIDDICPENVDISETDFRRFQMIPLDPKGTSQNDPNWVVRHQGKELVQTVNCDPGLAVGYDEFNAVDFSGTFFINTERDDDYAGFVFGYQSSSRFYVVMWKQVTQSYWDTNPTRAQGYSGLSVKVVNSTTGPGEHLRNALWHTGNTPGQVRTLWHDPRHIGWKDFTAYRWRLSHRPKTGFIRVVMYEGKKIMADSGPIYDKTYAGGRLGLFVFSQEMVFFSDLKYECRDP

SEQ ID NO: 192 - protein, 1119 aa, Artificial sequence
  A novel predicted alternative spliced variant protein product
MGLAWGLGVLFLMHVCGTNRIPESGGDNSVFDIFELTGAARKGSGRRLVKGPDPSSPAFRIEDANLIPPVPDDKFQDLVDAVRTEKGFLLLASLRQMKKTRGTLLALERKDHSGQVFSVVSNGKAGTLDLSLTVQGKQHVVSVEEALLATGQWKSITLFVQEDRAQLYIDCEKMENAELDVPIQSVFTRDLASIARLRIAKGGVNDNFQGVLQNVRFVFGTTPEDILRNKGCSSSTSVLLTLDNNVVNGSSPAIRTNYIGHKTKDLQAICGISCDELSSMVLELRGLRTIVTTLQDSIRKVTEENKELANELRRPPLCYHNGVQYRNNEEWTVDSCTECHCQNSVTICKKVSCPIMPCSNATVPDGECCPRCWPSDSADDGWSPWSEWTSCSTSCGNGIQQRGRSCDSLNNRCEGSSVQTRTCHIQECDKRFKQDGGWSHWSPWSSCSVTCGDGVITRIRLCNSPSPQMNGKPCEGEARETKACKKDACPINGGWGPWSPWDICSVTCGGGVQKRSRLCNNPTPQFGGKDCVGDVTENQICNKQDCPIDGCLSNPCFAGVKCTSYPDGSWKCGACPPGYSGNGIQCTDVDEVCKPRNPCTDGTHDCNKNAKCNYLGHYSDPMYRCECKPGYAGNGIICGEDTDLDGWPNENLVCVANATYHCKKDNCPNLPNSGQEDYDKDGIGDACDDDDDNDKIPDDRDNCPFHYNPAQYDYDRDDVGDRCDNCPYNHNPDQADTDNNGEGDACAADIDGDGILNERDNCQYVYNVDQRDTDMDGVGDQCDNCPLEHNPDQLDSDSDRIGDTCDNNQDIDEDGHQNNLDNCPYVPNANQADHDKDGKGDACDHDDDNDGIPDDKDNCRLVPNPDQKDSDGDGRGDACKDDFDHDSVPDIDDICPENVDISETDFRRFQMIPLDPKGTSQNDPNWVVRHQGKELVQTVNCDPGLAVGYDEFNAVDFSGTFFINTERDDDYAGFVFGYQSSSRFYVVMWKQVTQSYWDTNPTRAQGYSGLSVKVVNSTTGPGEHLRNALWHTGNTPGQVRTLWHDPRHIGWKDFTAYRWRLSHRPKTGFIRVVMYEGKKIMADSGPIYDKTYAGGRLGLFVFSQEMVFFSDLKYECRDP

SEQ ID NO: 193 - protein, 613 aa, Artificial sequence
  A novel predicted alternative spliced variant protein product
MLAPRGAAVLLLHLVLQRWLAAGAQATPQVFDLLPSSSQRLNPGALLPVLTDPALNDLYVISTFKLQTKSSATIFGLYSSTDNSKYFEFTVMGRLSKAILRYLKNDGKVHLVVFNNLQLADGRRHRILLRLSNLQRGAGSLELYLDCIQVDSVHNLPRAFAGPSQKPETIELRTFQRKPQDFLEELKLVVRGSLFQVASLQDCFLQQSEPLAATGTGDFNRQFLGQMTQLNQLLGEVKDLLRQQVKETSFLRNTIAECQACGPLKFQSPTPSTVVAPAPPAPPTRPPRRCDSNPCFRGVQCTDSRDGFQCGPCPEGYTGNGITCIDVDECKYHPCYPGVHCINLSPGFRCDACPVGFTGPMVQGVGISFAKSNKQVCTDIDECRNGACVPNSICVNTLGSYRCGPCKPGYTGDQIRGCKVERNCRNPELNPCSVNAQCIEERQGDVTCVCGVGWAGDGYICGKDVDIDSYPDEELPCSARNCKKDNCKYVPNSGQEDADRDGIGDACDEDADGDGILNEQDNCVLIHNVDQRNSDKDIFGDACDNCLSVLNNDQKDTDGDGRGDACDDDMDGDGIKNILDNCPKFPNRDQRDKDGDGVGDACDSCPDVSNPNQ

SEQ ID NO: 194 - protein, 101 aa, Artificial sequence
  A novel predicted alternative spliced variant protein product
MRVLGGRCGALLACLLLVLPVSEANFLSKQQASQVLVRKRRANSLLEETKQGNLERECIEELCNKEEAREVFENDPETFVFALFKLGYSLLHVSQLMLILT

SEQ ID NO: 195 - protein, 2772 aa, Artificial sequence
  A novel predicted alternative spliced variant protein product
MIPARFAGVLLALALILPGTLCAEGTRGRSSTARCSLFGSDFVNTFDGSMYSFAGYCSYLLAGGCQKRSFSIIGDFQNGKRVSLSVYLGEFFDIHLFVNGTVTQGDQRVSMPYASKGLYLETEAGYYKLSGEAYGFVARIDGSGNFQVLLSDRYFNKTCGLCGNFNIFAEDDFMTQEGTLTSDPYDFANSWALSSGEQWCERASPPSSSCNISSGEMQKGLWEQCQLLKSTSVFARCHPLVDPEPFVALCEKTLCECAGGLECACPALLEYARTCAQEGMVLYGWTDHSACKGQLLDEGLCVESTECPCVHSGKRYPPGTSLSRDCNTCICRNSQWICSNEECPGECLVTGQSHFKSFDNRYFTFSGICQYLLARDCQDHSFSIVIETVQCADDRDAVCTRSVTVRLPGLHNSLVKLKHGAGVAMDGQDIQLPLLKGDLRIQHTVTASVRLSYGEDLQMDWDGRGRLLVKLSPVYAGKTCGLCGNYNGNQGDDFLTPSGLAEPRVEDFGNAWKLHGDCQDLQKQHSDPCALNPRMTRFSEEACAVLTSPTFEACHRAVSPLPYLRNCRYDVCSCSDGRECLCGALASYAAACAGRGVRVAWREPGRCELNCPKGQVYLQCGTPCNLTCRSLSYPDEECNEACLEGCFCPPGLYMDERGDCVPKAQCPCYYDGEIFQPEDIFSDHHTMCYCEDGFMHCTMSGVPGSLLPDAVLSSPLSHRSKRSLSCRPPMVKLVCPADNLRAEGLECTKTCQNYDLECMSMGCVSGCLCPPGMVRHENRCVALERCPCFHQGKEYAPGETVKIGCNTCVCRDRKWNCTDHVCDATCSTIGMAHYLTFDGLKYLFPGECQYVLVQDYCGSNPGTFRILVGNKGCSHPSVKCKKRVTILVEGGEIELFDGEVNVKRPMKDETHFEVVESGRYIILLLGKALSVVWDRHLSISVVLKQTYQEKVCGLCGNFDGIQNNDLTSSNLQVEEDPVDFGNSWKVSSQCADTRKVPLDSSPATCHNNIMKQTMVDSSCRILTSDVFQDCNKLVDPEPYLDVCIYDTCSCESIGDCACFCDTIAAYAHVCAQHGKVVTWRTATLCPQSCEERNLRENGYECEWRYNSCAPACQVTCQHPEPLACPVQCVEGCHAHCPPGKILDELLQTCVDPEDCPVCEVAGRRFASGKKVTLNPSDPEHCQICHCDVVNLTCEACQEPGGLVVPPTDAPVSPTTLYVEDISEPPLHDFYCSRLLDLVFLLDGSSRLSEAEFEVLKAFVVDMMERLRISQKWVRVAVVEYHDGSHAYIGLKDRKRPSELRRIASQVKYAGSQVASTSEVLKYTLFQIFSKIDRPEASRIALLLMASQEPQRMSRNFVRYVQGLKKKKVIVIPVGIGPHANLKQIRLIEKQAPENKAFVLSSVDELEQQRDEIVSYLCDLAPEAPPPTLPPHMAQVTVGPGLLGVSTLGPKRNSMVLDVAFVLEGSDKIGEADFNRSKEFMEEVIQRMDVGQDSIHVTVLQYSYMVTVEYPFSEAQSKGDILQRVREIRYQGGNRTNTGLALRYLSDHSFLVSQGDREQAPNLVYMVTGNPASDEIKRLPGDIQVVPIGVGPNANVQELERIGWPNAPILIQDFETLPREAPDLVLQRCCSGEGLQIPTLSPAPDCSQPLDVILLLDGSSSFPASYFDEMKSFAKAFISKANIGPRLTQVSVLQYGSITTIDVPWNVVPEKAHLLSLVDVMQREGGPSQIGDALGFAVRYLTSEMHGARPGASKAVVILVTDVSVDSVDAAADAARSNRVTVFPIGIGDRYDAAQLRILAGPAGDSNVVKLQRIEDLPTMVTLGNSFLHKLCSGFVRICMDEDGNEKRPGDVWTLPDQCHTVTCQPDGQTLLKSHRVNCDRGLRPSCPNSQSPVKVEETCGCRWTCPCVCTGSSTRHIVTFDGQNFKLTGSCSYVLFQNKEQDLEVILHNGACSPGARQGCMKSIEVKHSALSVELHSDMEVTVNGRLVSVPYVGGNMEVNVYGAIMHEVRFNHLGHIFTFTPQNNEFQLQLSPKTFASKTYGLCGICDENGANDFMLRDGTVTTDWKTLVQEWTVQRPGQTCQPILEEQCLVPDSSHCQVLLLPLFAECHKVLAPATFYAICQQDSCHQEQVCEVIASYAHLCRTNGVCVDWRTPDFCAMSCPPSLVYNHCEHGCPRHCDGNVSSCGDHPSEGCFCPPDKVMLEGSCVPEEACTQCIGEDGVQHQFLEAWVPDHQPCQICTCLSGRKVNCTTQPCPTAKAPTCGLCEVARLRQNADQCCPEYECVCDPVSCDLPPVPHCERGLQPTLTNPGECRPNFTCACRKEECKRVSPPSCPPHRLPTLRKTQCCDEYECACNCVNSTVSCPLGYLASTATNDCGCTTTTCLPDKVCVHRSTIYPVGQFWEEGCDVCTCTDMEDAVMGLRVAQCSQKPCEDSCRSGFTYVLHEGECCGRCLPSACEVVTGSPRGDSQSSWKSVGSQWASPENPCLINECVRVKEEVFIQQRNVSCPQLEVPVCPSGFQLSCKTSACCPSCRCERMEACMLNGTVIGPGKTVMIDVCTTCRCMVQVGVISGFKLECRKTTCNPCPLGYKEENNTGECCGRCLPTACTIQLRGGQIMTLKRDETLQDGCDTHFCKVNERGEYFWEKRVTGCPPFDEHKCLAEGGKIMKIPGTCCDTCEEPECNDITARLQYVKVGSCKSEVEVDIHYCQGKCASKAMYSIDINDVQDQCSCCSPTRTEPMQVALHCTNGSVVYHEVLNAMECKCSPRKCSK

SEQ ID NO: 196 - protein, 552 aa, Artificial sequence
  A novel predicted alternative spliced variant protein product
MIPARFAGVLLALALILPGTLCAEGTRGRSSTARCSLFGSDFVNTFDGSMYSFAGYCSYLLAGGCQKRSFSIIGDFQNGKRVSLSVYLGEFFDIHLFVNGTVTQGDQRVSMPYASKGLYLETEAGYYKLSGEAYGFVARIDGSGNFQVLLSDRYFNKTCGLCGNFNIFAEDDFMTQEGTLTSDPYDFANSWALSSGEQWCERASPPSSSCNISSGEMQKGLWEQCQLLKSTSVFARCHPLVDPEPFVALCEKTLCECAGGLECACPALLEYARTCAQEGMVLYGWTDHSACSPVCPAGMEYRQCVSPCARTCQSLHINEMCQERCVDGCSCPEGQLLDEGLCVESTECPCVHSGKRYPPGTSLSRDCNTCICRNSQWICSNEECPGECLVTGQSHFKSFDNRYFTFSGICQYLLARDCQDHSFSIVIETVQCADDRDAVCTRSVTVRLPGLHNSLVKLKHGAGVAMDGQDIQLPLLKAGPRLCREDLRPVWELQWQPGRGLPYPLWAGGAPGGGLRERLEAARGLPGPAEAAQRSLRPQPAHEGSPRRRARS

SEQ ID NO: 197 - protein, 2774 aa, Artificial sequence
  A novel predicted alternative spliced variant protein product
MIPARFAGVLLALALILPGTLCAEGTRGRSSTARCSLFGSDFVNTFDGSMYSFAGYCSYLLAGGCQKRSFSIIGDFQNGKRVSLSVYLGEFFDIHLFVNGTVTQGDQRVSMPYASKGLYLETEAGYYKLSGEAYGFVARIDGSGNFQVLLSDRYFNKTCGLCGNFNIFAEDDFMTQEGTLTSDPYDFANSWALSSGEQWCERASPPSSSCNISSGEMQKGLWEQCQLLKSTSVFARCHPLVDPEPFVALCEKTLCECAGGLECACPALLEYARTCAQEGMVLYGWTDHSACSPVCPAGMEYRQCVSPCARTCQSLHINEMCQERCVDGCSCPEGQLLDEGLCVESTECPCVHSGKRYPPGTSLSRDCNTCICRNSQWICSNEECPGECLVTGQSHFKSFDNRYFTFSGICQYLLARDCQDHSFSIVIETVQCADDRDAVCTRSVTVRLPGLHNSLVKLKHGAGVAMDGQDIQLPLLKGDLRIQHTVTASVRLSYGEDLQMDWDGRGRLLVKLSPVYAGKTCGLCGNYNGNQGDDFLTPSGLAEPRVEDFGNAWKLHGDCQDLQKQHSDPCALNPRMTRFSEEACAVLTSPTFEACHRAVSPLPYLRNCRYDVCSCSDGRECLCGALASYAAACAGRGVRVAWREPGRCELNCPKGQVYLQCGTPCNLTCRSLSYPDEECNEACLEGCFCPPGLYMDERGDCVPKAQCPCYYDGEIFQPEDIFSDHHTMCYCEDGFMHCTMSGVPGSLLPDAVLSSPLSHRSKRSLSCRPPMVKLVCPADNLRAEGLECTKTCQNYDLECMSMGCVSGCLCPPGMVRHENRCVALERCPCFHQGKEYAPGETVKIGCNTCVCRDRKWNCTDHVCDATCSTIGMAHYLTFDGLKYLFPGECQYVLVQDYCGSNPGTFRILVGNKGCSHPSVKCKKRVTILVEGGEIELFDGEVNVKRPMKDETHFEVVESGRYIILLLGKALSVVWDRHLSISVVLKQTYQEKVCGLCGNFDGIQNNDLTSSNLQVEEDPVDFGNSWKVSSQCADTRKVPLDSSPATCHNNIMKQTMVDSSCRILTSDVFQDCNKLVDPEPYLDVCIYDTCSCESIGDCACFCDTIAAYAHVCAQHGKVVTWRTATLCPQSCEERNLRENGYECEWRYNSCAPACQVTCQHPEPLACPVQCVEGCHAHCPPGKILDELLQTCVDPEDCPVCEVAGRRFASGKKVTLNPSDPEHCQICHCDVVNLTCEACQEPGGLVVPPTDAPVSPTTLYVEDISEPPLHDFYCSRLLDLVFLLDGSSRLSEAEFEVLKAFVVDMMERLRISQKWVRVAVVEYHDGSHAYIGLKDRKRPSELRRIASQVKYAGSQVASTSEVLKYTLFQIFSKIDRPEASRIALLLMASQEPQRMSRNFVRYVQGLKKKKVIVIPVGIGPHANLKQIRLIEKQAPENKAFVLSSVDELEQQRDEIVSYLCDLAPEAPPPTLPPHMAQVTVGPGLLGVSTLGPKRNSMVLDVAFVLEGSDKIGEADFNRSKEFMEEVIQRMDVGQDSIHVTVLQYSYMVTVEYPFSEAQSKGDILQRVREIRYQGGNRTNTGLALRYLSDHSFLVSQGDREQAPNLVYMVTGNPASDEIKRLPGDIQVVPIGVGPNANVQELERIGWPNAPILIQDFETLPREAPDLVLQRCCSGEGLQIPTLSPAPGPRLTQVSVLQYGSITTIDVPWNVVPEKAHLLSLVDVMQREGGPSQIGDALGFAVRYLTSEMHGARPGASKAVVILVTDVSVDSVDAAADAARSNRVTVFPIGIGDRYDAAQLRILAGPAGDSNVVKLQRIEDLPTMVTLGNSFLHKLCSGFVRICMDEDGNEKRPGDVWTLPDQCHTVTCQPDGQTLLKSHRVNCDRGLRPSCPNSQSPVKVEETCGCRWTCPCVCTGSSTRHIVTFDGQNFKLTGSCSYVLFQNKEQDLEVILHNGACSPGARQGCMKSIEVKHSALSVELHSDMEVTVNGRLVSVPYVGGNMEVNVYGAIMHEVRFNHLGHIFTFTPQNNEFQLQLSPKTFASKTYGLCGICDENGANDFMLRDGTVTTDWKTLVQEWTVQRPGQTCQPILEEQCLVPDSSHCQVLLLPLFAECHKVLAPATFYAICQQDSCHQEQVCEVIASYAHLCRTNGVCVDWRTPDFCAMSCPPSLVYNHCEHGCPRHCDGNVSSCGDHPSEGCFCPPDKVMLEGSCVPEEACTQCIGEDGVQHQFLEAWVPDHQPCQICTCLSGRKVNCTTQPCPTAKAPTCGLCEVARLRQNADQCCPEYECVCDPVSCDLPPVPHCERGLQPTLTNPGECRPNFTCACRKEECKRVSPPSCPPHRLPTLRKTQCCDEYECACNCVNSTVSCPLGYLASTATNDCGCTTTTCLPDKVCVHRSTIYPVGQFWEEGCDVCTCTDMEDAVMGLRVAQCSQKPCEDSCRSGFTYVLHEGECCGRCLPSACEVVTGSPRGDSQSSWKSVGSQWASPENPCLINECVRVKEEVFIQQRNVSCPQLEVPVCPSGFQLSCKTSACCPSCRCERMEACMLNGTVIGPGKTVMIDVCTTCRCMVQVGVISGFKLECRKTTCNPCPLGYKEENNTGECCGRCLPTACTIQLRGGQIMTLKRDETLQDGCDTHFCKVNERGEYFWEKRVTGCPPFDEHKCLAEGGKIMKIPGTCCDTCEEPECNDITARLQYVKVGSCKSEVEVDIHYCQGKCASKAMYSIDINDVQDQCSCCSPTRTEPMQVALHCTNGSVVYHEVLNAMECKCSPRKCSK

SEQ ID NO: 198 - protein, 559 aa, Artificial sequence
  A novel predicted alternative spliced variant protein product
MEPQVTLNVTFKNEIQSFLVSDPENTTWADIEAMVKVSFDLNTIQIKYLDEENEEVSINSQGEYEEALKMAVKQGNQLQMQVHEGHHVVDEAPPPVVGAKRLAARAGKKPLAHYSSLVRVLGSDMKTPEDPAVQSFPLVPCDTDQPQDKPPDWFTSYLETFREQVVNETVEKLEQKLHEKLVLQNPSLGSCPSEVSMPTSEETLFLPENQFSWHIACNNCQRRIVGVRYQCSLCPSYNICEDCEAGPYGHDTNHVLLKLRRPVVGSSEPFCHSKYSTPRLPAALEQVRLQKQVDKNFLKAEKQRLRAEKKQRKAEVKELKKQLKLHRKIHLWNSIHGLQSPKSPLGRPESLLQSNTLMLPLQPCTSVMPMLSAAFVDENLPDGTHLQPGTKFIKHWRMKNTGNVKWSADTKLKFMWGNLTLASTEKKDVLVPCLKAGHVGVVSVEFIAPALEGTYTSHWRLSHKGQQFGPRVWCSIIVDPFPSEESPDNIEKGMISSSKTDDLTCQQEETFLLAKEERQLGEVTEQTEGTAACIPQKAKNVASERELYIPSVDLLTAQM

SEQ ID NO: 199 - protein, 929 aa, Artificial sequence
  A novel predicted alternative spliced variant protein product
MEPQVTLNVTFKNEIQSFLVSDPENTTWADIEAMVKVSFDLNTIQIKYLDEENEEVSINSQGEYEEALKMAVKQGNQLQMQVHEGHHVVDEAPPPVVGAKRLAARAGKKPLAHYSSLVRVLGSDMKTPEDPAVQSFPLVPCDTDQPQDKPPDWFTSYLETFREQVVNETVEKLEQKLHEKLVLQNPSLGSCPSEVSMPTSEETLFLPENQFSWHIACNNCQRRIVGVRYQCSLCPSYNICEDCEAGPYGHDTNHVLLKLRRPVVGSSEPFCHSKYSTPRLPAALEQVRLQKQVDKNFLKAEKQRLRAEKKQRKAEVKELKKQLKLHRKIHLWNSIHGLQSPKSPLGRPESLLQSNTLMLPLQPCTSVMPMLSAAFVDENLPDGTHLQPGTKFIKHWRMKNTGNVKWSADTKLKFMWGNLTLASTEKKDVLVPCLKAGHVGVVSVEFIAPALEGTYTSHWRLSHKGQQFGPRVWCSIIVDPFPSEESPDNIEKGMISSSKTDDLTCQQEETFLLAKEERQLGEVTEQTEGTAACIPQKAKNVASERELYIPSVDLLTAQDLLSFELLDINIVQELERVPHNTPVDSMVSVKRKAENIASVEEAEEDLSGTQFVCETVIRSLTLDAAPDHNPPCRQKSLQMTFALPEGPLGNEKEEIIHIAEEEAVMEEEEDEEDEEEEDELKDEVQSQSSASSEDYIIILPECFDTSRPLGDSMYSSALSQPGLERGAEGKPGVEAGQEPAEAGERLPGGENQPQEHSISDILTTSQTLETVPLIPEVVELPPSLPRSSPCVHHHGSPGVDLPVTIPEVSSVPDQIRGEPRGSSGLVNSRQKSYDHSRHHHGSSIAGGLVKGALSVAASAYKALFAGPPVTAQPIISEDQTAALMARLFEMGFCDRQLNLRLLKKHNYNILQVVTELLQLNNNDWYSQRY

SEQ ID NO: 200 - protein, 875 aa, Artificial sequence
  A novel predicted alternative spliced variant protein product
MEPQVTLNVTFKNEIQSFLVSDPENTTWADIEAMVKVSFDLNTIQIKYLDEENEEVSINSQGEYEEALKMAVKQGNQLQMQVHEGHHVVDEAPPPVVGAKRLAARAGKKPLAHYSSLVRVLGSDMKTPEDPAVQSFPLVPCDTDQPQDKPPDWFTSYLETFREQVVNETVEKLEQKLHEKLVLQNPSLGSCPSEVSMPTSEETLFLPENQFSWHIACNNCQRRIVGVRYQCSLCPSYNICEDCEAGPYGHDTNHVLLKLRRPVVGSSEPFCHSKYSTPRLPAALEQVRLQKQVDKNFLKAEKQRLRAEKKQRKAEVKELKKQLKLHRKIHLWNSIHGLQSPKSPLGRPESLLQSNTLMLPLQPCTSVMPMLSAAFVDENLPDGTHLQPGTKFIKHWRMKNTGNVKWSADTKLKFMWGNLTLASTEKKDVLVPCLKAGHVGVVSVEFIAPALEGTYTSHWRLSHKGQQFGPRVWCSIIVDPFPSEESPDNIEKGMISSSKTDDLTCQQEETFLLAKEERQLGEVTEQTEGTAACIPQKAKNVASERELYIPSVDLLTAQDLLSFELLDINIVQELERVPHNTPVDVTPCMSPLPHDSPLIEKPGLGQIEEENEGAGFKALPDSMVSVKRKAENIASVEEAEEDLSGTQFVCETVIRSLTLDAAPDHNPPCRQKSLQMTFALPEGPLGNEKEEIIHIAEEEAVMEEEEDEEDEEEEDELKDEVQSQSSASSEDYIIILPECFDTSRPLGDSMYSSALSQPGLERGAEGKPGVEAGQEPAEAGERLPGGENQPQEHSISDILTTSQTLETVPLIPEVVELPPSLPRSSPCVHHHGSPGVDLPVTIPEVSSVPDQIRGEPRGSSGLVNSRQKSYDHSSQ

SEQ ID NO: 201 - DNA, 89 bp, Artificial sequence
  Ephrine receptor B1 novel alternative spliced exon
cctcatctcacctcaacccccttgttgcaaagtaaggctggtgcttcctgttttctcagcaattagcatggaaaacagacctcccaggt

SEQ ID NO: 202 - DNA, 106 bp, Artificial sequence
  FSH receptor novel alternative spliced exon
aggaacagaaggaccaggactcctacagaaccaaatgtcctattagccaaatatccatctggccaaggtgtgttggaggaaccggagtctctctcctcatccatgt

SEQ ID NO: 203 - DNA, 73 bp, Artificial sequence
  HPA2 novel alternative spliced exon
agattcttttttgtttcacttgtattcatttctttgattcactcggaatctgttttgatgcatggtgaaaggt

SEQ ID NO: 204 - DNA, 98 bp, Artificial sequence
  HPA2 novel alternative spliced exon
agttcctcttgcctgaagagaatttgaaccactctttgtctataaggagctctctgcaacacagtctagaacttgagagaaatctgaatgattttata

SEQ ID NO: 205 - protein, 18 aa, Artificial sequence
  A novel predicted alternative spliced variant protein product
GVLQYGCQWGRLDCNTTS

SEQ ID NO: 206 - protein, 29 aa, Artificial sequence
  A novel predicted alternative spliced variant protein product
WNSQRLRMSWSRSSKSITWGMYLLLNLLG

SEQ ID NO: 207 - protein, 82 aa, Artificial sequence
  A novel predicted alternative spliced variant protein product
DRGSAGRVSGAFPLLPGRGQRCPHVCIHHGCRPSLLLLPHVLVRAQCCQPLRGCAGCVHASLPEVSGCPFPGLHLLPPSTPC

SEQ ID NO: 208 - protein, 12 aa, Artificial sequence
  A novel predicted alternative spliced variant protein product
AHLDRFCSWRRL

SEQ ID NO: 209 - protein, 9 aa, Artificial sequence
  A novel predicted alternative spliced variant protein product
GCACSLSLG

SEQ ID NO: 210 - protein, 28 aa, Artificial sequence
  A novel predicted alternative spliced variant protein product
SFTRQQKIGGYSVSISACHWPSLHFFIH

SEQ ID NO: 211 - protein, 11 aa, Artificial sequence
  A novel predicted alternative spliced variant protein product
NYIKWVFGGPG

SEQ ID NO: 212 - protein, 7 aa, Artificial sequence
  A novel predicted alternative spliced variant protein product
GGSEYHG

SEQ ID NO: 213 - protein, 58 aa, Artificial sequence
  A novel predicted alternative spliced variant protein product
LAKLDITRLSPRMPPVPSAHPTATLSGKEPPRAPVTEAFSELTTMLPLCPAPVHHLLP

SEQ ID NO: 214 - protein, 17 aa, Artificial sequence
  A novel predicted alternative spliced variant protein product
IVAVGGLLPCALLPIQA

SEQ ID NO: 215 - protein, 11 aa, Artificial sequence
  A novel predicted alternative spliced variant protein product
ANKPSSGSKHS

SEQ ID NO: 216 - protein, 32 aa, Artificial sequence
  A novel predicted alternative spliced variant protein product
GNGLIAKRLCTAISSSITAQAEGSLEKCTRGV

SEQ ID NO: 217 - protein, 11 aa, Artificial sequence
  A novel predicted alternative spliced variant protein product
RLPPLQPQWHL

SEQ ID NO: 218 - protein, 78 aa, Artificial sequence
  A novel predicted alternative spliced variant protein product
VLTTVQSALILKMAQTVWKNVQMAYRGQTVSFSSMLIQIGSATHAIQTAPKGVTVPLVMTAFTHGRAIPLYHNMLELP

SEQ ID NO: 219 - protein, 5 aa, Artificial sequence
  A novel predicted alternative spliced variant protein product
RTFHT

SEQ ID NO: 220 - protein, 23 aa, Artificial sequence
  A novel predicted alternative spliced variant protein product
WLPRRTWTSAASTWRTRRGLGTM

SEQ ID NO: 221 - protein, 24 aa, Artificial sequence
  A novel predicted alternative spliced variant protein product
RWHQQGVWVHREGSGEQLHGPDVG

SEQ ID NO: 222 - protein, 17 aa, Artificial sequence
  A novel predicted alternative spliced variant protein product
KTNPRVCIQRTVRRKLV

SEQ ID NO: 223 - protein, 34 aa, Artificial sequence
  A novel predicted alternative spliced variant protein product
NRRTRTPTEPNVLLAKYPSGQGVLEEPESLSSSI

SEQ ID NO: 224 - protein, 125 aa, Artificial sequence
  A novel predicted alternative spliced variant protein product
PQLRSWVHYTFYHQLASIKKENQAGWDSQRQAGSPVPAAALWAGGPKVQVSATEWPALSDGGRRDPPRIEAPPPSGRPDIGHPSSHHGLLCGQECQCFGLPLPISYPHTHGYQWACWAASTPPLQ

SEQ ID NO: 225 - protein, 17 aa, Artificial sequence
  A novel predicted alternative spliced variant protein product
QWLIHTLQERRFGLKVW

SEQ ID NO: 226 - protein, 13 aa, Artificial sequence
  A novel predicted alternative spliced variant protein product
MVEHFRIAGQSGH

SEQ ID NO: 227 - protein, 10 aa, Artificial sequence
  A novel predicted alternative spliced variant protein product
TTGSLSSTSA

SEQ ID NO: 228 - protein, 13 aa, Artificial sequence
  A novel predicted alternative spliced variant protein product
VLIPIAQEKLIFQ

SEQ ID NO: 229 - protein, 18 aa, Artificial sequence
  A novel predicted alternative spliced variant protein product
AGQKHGGQVLYSKEILCL

SEQ ID NO: 230 - protein, 15 aa, Artificial sequence
  A novel predicted alternative spliced variant protein product
EFLRSILGNRKFPSH

SEQ ID NO: 231 - protein, 21 aa, Artificial sequence
  A novel predicted alternative spliced variant protein product
ANVHSGTCCRPCCYSCCLYVW

SEQ ID NO: 232 - protein, 8 aa, Artificial sequence
  A novel predicted alternative spliced variant protein product
ASQKCGEA

SEQ ID NO: 233 - protein, 20 aa, Artificial sequence
  A novel predicted alternative spliced variant protein product
LYSQTSLPSHCSPWRISQVL

SEQ ID NO: 234 - protein, 49 aa, Artificial sequence
  A novel predicted alternative spliced variant protein product
FSKSILEKKKLNWHSSLTQLWKLTWRIIPAMLKTEMDGNMPVFCCVKRI

SEQ ID NO: 235 - protein, 16 aa, Artificial sequence
  A novel predicted alternative spliced variant protein product
LCRCVYWSTSLHGSWL

SEQ ID NO: 236 - protein, 55 aa, Artificial sequence
  A novel predicted alternative spliced variant protein product
GLVPSILPAPQRAQRVPQRAELHPHPGRPVLRPPLHWCGRVSVFQSPAGEDKVHL

SEQ ID NO: 237 - protein, 17 aa, Artificial sequence
  A novel predicted alternative spliced variant protein product
QWRGTEDRLLVHRHGSR

SEQ ID NO: 238 - protein, 11 aa, Artificial sequence
  A novel predicted alternative spliced variant protein product
VSLLAVVPLAK

SEQ ID NO: 239 - protein, 6 aa, Artificial sequence
  A novel predicted alternative spliced variant protein product
SVSAEQ

SEQ ID NO: 240 - protein, 15 aa, Artificial sequence
  A novel predicted alternative spliced variant protein product
RTTRRTVVWFLPQKS

SEQ ID NO: 241 - protein, 13 aa, Artificial sequence
  A novel predicted alternative spliced variant protein product
WNGAQQKQGVCGI

SEQ ID NO: 242 - protein, 48 aa, Artificial sequence
  A novel predicted alternative spliced variant protein product
YVARERERVSRSVIVACINTVTFVHWLVTVHVCFINEAALNKFIFCLE

SEQ ID NO: 243 - protein, 10 aa, Artificial sequence
  A novel predicted alternative spliced variant protein product
AAIVLMSTWT

SEQ ID NO: 244 - protein, 13 aa, Artificial sequence
  A novel predicted alternative spliced variant protein product
NALLLYCQWMCRH

SEQ ID NO: 245 - protein, 71 aa, Artificial sequence
  A novel predicted alternative spliced variant protein product
RSSKFNVLEIHNGSCKQPQPNLQGVQKCFPQGPLWYNLRNSNLETLCKLCQWEYGKCCGEALCGSSICWRE

SEQ ID NO: 246 - protein, 46 aa, Artificial sequence
  A novel predicted alternative spliced variant protein product
PFMVQPQKQQLGDVVQTMSMGIWKMLWGGFMWKQHLLERVNMWSRI

SEQ ID NO: 247 - protein, 31 aa, Artificial sequence
  A novel predicted alternative spliced variant protein product
VDKWSSCSQCILLFRKKSDSLPSRHSAAPLL

SEQ ID NO: 248 - protein, 8 aa, Artificial sequence
  A novel predicted alternative spliced variant protein product
GRSPVLAP

SEQ ID NO: 249 - protein, 169 aa, Artificial sequence
  A novel predicted alternative spliced variant protein product
GARLAGWVSGVSWRTPVTQAPVLAVVSARVQWWLAPPDSHAGAPVASEALTAPCQIPASAALVPTVPAAQWGPMDASSAPAHLATRAAAAEATWMSAGWVSPAAMVAPASTHLAPSAASVQLATQGHYVRTPRCPVHPHHAVTGAPAGRVATSLTTVPVFLGLRVRIVK

SEQ ID NO: 250 - protein, 41 aa, Artificial sequence
  A novel predicted alternative spliced variant protein product
GGGAVPEESADHNRHLHRPPCGRHHVCGGLLQNQETAEKAA

SEQ ID NO: 251 - protein, 41 aa, Artificial sequence; identical to SEQ ID NO: 250
  A novel predicted alternative spliced variant protein product

SEQ ID NO: 252 - protein, 21 aa, Artificial sequence
  A novel predicted alternative spliced variant protein product
RNSGKSCMTVFGRAFGLNETI

SEQ ID NO: 253 - protein, 21 aa, Artificial sequence
  A novel predicted alternative spliced variant protein product
RNSGKSCMTVFGRAFGLNETI

SEQ ID NO: 254 - protein, 116 aa, Artificial sequence
  A novel predicted alternative spliced variant protein product
YVSAMTTPARMSPVDFHTPSSPKSPPSEMSPPVSSMTVSMPSMAVSPFMEEERPLLLVTPPRLREKKFDHHPQQFSSFHHNPAHDSNSLPASPLRIVEDEEYETTQEYEPAQEPVK

SEQ ID NO: 255 - protein, 41 aa, Artificial sequence; identical to SEQ ID NO: 250
  A novel predicted alternative spliced variant protein product

SEQ ID NO: 256 - protein, 23 aa, Artificial sequence
  A novel predicted alternative spliced variant protein product
FVFALFKLGYSLLHVSQLMLILT

SEQ ID NO: 257 - protein, 20 aa, Artificial sequence
  A novel predicted alternative spliced variant protein product
WQQLQKRIHCHSGTASWHQG

SEQ ID NO: 258 - protein, 8 aa, Artificial sequence
  A novel predicted alternative spliced variant protein product
GGGRGKRH

SEQ ID NO: 259 - protein, 10 aa, Artificial sequence
  A novel predicted alternative spliced variant protein product
GNASRLHTFT

SEQ ID NO: 260 - protein, 32 aa, Artificial sequence
  A novel predicted alternative spliced variant protein product
TEEVLPGLRYYDEQLQPPEQQAQESIHKYRCL

SEQ ID NO: 261 - protein, 43 aa, Artificial sequence
  A novel predicted alternative spliced variant protein product
RSNMSSFMIHWLRPYLVKKLRCWTVIFMPMLMHSSFLDQQAKQ

SEQ ID NO: 262 - protein, 17 aa, Artificial sequence
  A novel predicted alternative spliced variant protein product
VGCFCEVLTCNNLVMSC

SEQ ID NO: 263 - protein, 34 aa, Artificial sequence
  A novel predicted alternative spliced variant protein product
APGQVHSPADPPLWHPLHRLRLLPRGRYGDPAVF

SEQ ID NO: 264 - protein, 19 aa, Artificial sequence
  A novel predicted alternative spliced variant protein product
EMCRIIAAYVHFTLISRGI

SEQ ID NO: 265 - protein, 12 aa, Artificial sequence
  A novel predicted alternative spliced variant protein product
LPVSSSPLTTTW

SEQ ID NO: 266 - protein, 75 aa, Artificial sequence
  A novel predicted alternative spliced variant protein product
PATLRTMAGLHGPSGPPVLRAVAMEFSSAAAPAIASTTDVRAPRSRHGPAIFRSVTRDLNRMVAGATGPRGHLVL

SEQ ID NO: 267 - protein, 15 aa, Artificial sequence
  A novel predicted alternative spliced variant protein product
VSGSEQDLPHQLHVE

SEQ ID NO: 268 - protein, 40 aa, Artificial sequence
  A novel predicted alternative spliced variant protein product
VKIGVKKTWRMEDVNTYACQHHRLMITLQNIPVPVPVGTM

SEQ ID NO: 269 - protein, 36 aa, Artificial sequence
  A novel predicted alternative spliced variant protein product
GESKKKTWTLQVMGKDSMYLVRYRSSKTNSDFPPRY

SEQ ID NO: 270 - protein, 9 aa, Artificial sequence
  A novel predicted alternative spliced variant protein product
PYKKSPLLA

SEQ ID NO: 271 - protein, 75 aa, Artificial sequence
  A novel predicted alternative spliced variant protein product
AGPRLCREDLRPVWELQWQPGRGLPYPLWAGGAPGGGLRERLEAARGLPGPAEAAQRSLRPQPAHEGSPRRRARS

SEQ ID NO: 272 - protein, 65 aa, Artificial sequence
  A novel predicted alternative spliced variant protein product
AAIASSLIRQKRQARESNSDRVSASKRRSSPSKDGRSLCERHVLGVFSKVRFCSGRKRPVRRRPA

SEQ ID NO: 273 - DNA, 2502 bp, Artificial sequence
  A novel predicted alternative spliced variant
  misc_feature (2145)..(2145): n is a, c, g, or t
atgggcacgtccgcgctctgggcgctctggctgctgctcgcgctgtgctgggcgccccgggagagcggcgccaccggaaccgggagaaaagccaaatgtgaaccctcccaattccagtgcacaaatggtcgctgtattacgctgttgtggaaatgtgatggggatgaagactgtgttgacggcagtgatgaaaagaactgtgtaaagaagacgtgtgctgaatctgacttcgtgtgcaacaatggccagtgtgttcccagccgatggaagtgtgatggagatcctgactgcgaagatggttcagatgaaagcccagaacagtgccatatgagaacatgccgcatacatgaaatcagctgtggcgcccattctactcagtgtatcccagtgtcctggagatgtgatggtgaaaatgattgtgacagtggagaagatgaagaaaactgtggcaatataacatgtagtcccgacgagttcacctgctccagtggccgctgcatctccaggaactttgtttgcaatggccaggatgactgcagcgatggcagtgatgagctggactgtgccccgccaacctgtggcgcccatgagttccagtgcagcacctcctcctgcatccccatcagctgggtatgcgacgatgatgcagactgctccgaccaatctgatgagtccctggagcagtgtggccgtcagccagtcatacacaccaagtgtccagccagcgaaatccagtgcggctctggcgagtgcatccataagaagtggcgatgtgatggggaccctgactgcaaggatggcagtgatgaggtcaactgtccctctcgaacttgccgacctgaccaatttgaatgtgaggatggcagctgcatccatggcagcaggcagtgtaatggtatccgagactgtgtcgatggttccgatgaagtcaactgcaaaaatgtcaatcagtgcttgggccctggaaaattcaagtgcagaagtggagaatgcatagatatcagcaaagtatgtaaccaggagcaggactgcagggactggagtgatgagcccctgaaagagtgtcatattgatgaatgccaaaatccaggaatctgcagtcaaatttgtatcaacttaaaaggcggttacaagtgtgaatgtagtcgtggctatcaaatggatcttgctactggcgtgtgcaaggcagtaggcaaagagccaagtctgatcttcactaatcgaagagacatcaggaagattggcttagagaggaaagaatatatccaactagttgaacagctaagaaacactgtggctctcgatgctgacattgctgcccagaaactattctgggccgatctaagccaaaaggctatcttcagtgcctcaattgatgacaaggttggtagacatgttaaaatgatcgacaatgtctataatcctgcagccattgctgttgattgggtgtacaagaccatctactggactgatgcggcttctaagactatttcagtagctaccctagatggaaccaagaggaagttcctgtttaactctgacttgcgagagcctgcctccatagctgtggacccactgtctggctttgtttactggtcagactggggtgaaccagctaaaatagaaaaagcaggaatgaatggattcgatagacgtccactggtgacagcggatatccagtggcctaacggaattacacttgaccttataaaaagtcgcctctattggcttgattctaagttgcacatgttatccagcgtggacttgaatggccaagatcgtaggatagtactaaagtctctggagttcctagctcatcctcttgcactaacaatatttgaggatcgtgtctactggatagatggggaaaatgaagcagtctatggtgccaataaattcactggatcagagctagccactctagtcaacaacctgaatgatgcccaagacatcattgtctatcatgaacttgtacagccatcaggtaaaaattggtgtgaagaagacatggagaatggaggatgtgaatacctatgcctgccagcaccacaaattaatgatcactctccaaaatatacctgttcctgtcccagtgggtacaatgtagaggaaaatggccgagactgtcaaagtactgcaactacngtgacttacagtgagacaaaagatacgaacacaacagaaatttcagcaactagtggactagttcctggagggatcaatgtgaccacagcagtatcagaggtcagtgttcccccaaaagggacttctgccgcatgggccattcttcctctcttgctcttagtgatggcagcagtaggtggctacttgatgtggcggaattggcaacacaagaacatgaaaagcatgaactttgacaatcctgtgtacttgaaaaccactgaagaggacctctccatagacattggtagacacagtgcttctgttggacacacgtacccagcaatatcagttgtaagcacagatgatgatctagcttga

SEQ ID NO: 274 - DNA, 2496 bp, Artificial sequence
  A novel predicted alternative spliced variant
  misc_feature (2139)..(2139): n is a, c, g, or t
atgggcacgtccgcgctctgggcgctctggctgctgctcgcgctgtgctgggcgccccgggagagcggcgccaccggaaccgggagaaaagccaaatgtgaaccctcccaattccagtgcacaaatggtcgctgtattacgctgttgtggaaatgtgatggggatgaagactgtgttgacggcagtgatgaaaagaactgtgtaaagaagacgtgtgctgaatctgacttcgtgtgcaacaatggccagtgtgttcccagccgatggaagtgtgatggagatcctgactgcgaagatggttcagatgaaagcccagaacagtgccatatgagaacatgccgcatacatgaaatcagctgtggcgcccattctactcagtgtatcccagtgtcctggagatgtgatggtgaaaatgattgtgacagtggagaagatgaagaaaactgtggcaatataacatgtagtcccgacgagttcacctgctccagtggccgctgcatctccaggaactttgtttgcaatggccaggatgactgcagcgatggcagtgatgagctggactgtgccccgccaacctgtggcgcccatgagttccagtgcagcacctcctcctgcatccccatcagctgggtatgcgacgatgatgcagactgctccgaccaatctgatgagtccctggagcagtgtggccgtcagccagtcatacacaccaagtgtccagccagcgaaatccagtgcggctctggcgagtgcatccataagaagtggcgatgtgatggggaccctgactgcaaggatggcagtgatgaggtcaactgtccctctcgaacttgccgacctgaccaatttgaatgtgaggatggcagctgcatccatggcagcaggcagtgtaatggtatccgagactgtgtcgatggttccgatgaagtcaactgcaaaaatgtcaatcagtgcttgggccctggaaaattcaagtgcagaagtggagaatgcatagatatcagcaaagtatgtaaccaggagcaggactgcagggactggagtgatgagcccctgaaagagtgtcatataaacgaatgcttggtaaataatggtggatgttctcatatctgcaaagacctagttataggctacgagtgtgactgtgcagctgggtttgaactgatagataggaaaacctgtggaggcaaagagccaagtctgatcttcactaatcgaagagacatcaggaagattggcttagagaggaaagaatatatccaactagttgaacagctaagaaacactgtggctctcgatgctgacattgctgcccagaaactattctgggccgatctaagccaaaaggctatcttcagtgcctcaattgatgacaaggttggtagacatgttaaaatgatcgacaatgtctataatcctgcagccattgctgttgattgggtgtacaagaccatctactggactgatgcggcttctaagactatttcagtagctaccctagatggaaccaagaggaagttcctgtttaactctgacttgcgagagcctgcctccatagctgtggacccactgtctggctttgtttactggtcagactggggtgaaccagctaaaatagaaaaagcaggaatgaatggattcgatagacgtccactggtgacagcggatatccagtggcctaacggaattacacttgaccttataaaaagtcgcctctattggcttgattctaagttgcacatgttatccagcgtggacttgaatggccaagatcgtaggatagtactaaagtctctggagttcctagctcatcctcttgcactaacaatatttgaggatcgtgtctactggatagatggggaaaatgaagcagtctatggtgccaataaattcactggatcagagctagccactctagtcaacaacctgaatgatgcccaagacatcattgtctatcatgaacttgtacagccatcaggtaaaaattggtgtgaagaagacatggagaatggaggatgtgaatacctatgcctgccagcaccacaaattaatgatcactctccaaaatatacctgttcctgtcccagtgggtacaatgtagaggaaaatggccgagactgtcaaagtactgcaactacngtgacttacagtgagacaaaagatacgaacacaacagaaatttcagcaactagtggactagttcctggagggatcaatgtgaccacagcagtatcagaggtcagtgttcccccaaaagggacttctgccgcatgggccattcttcctctcttgctcttagtgatggcagcagtaggtggctacttgatgtggcggaattggcaacacaagaacatgaaaagcatgaactttgacaatcctgtgtacttgaaaaccactgaagaggacctctccatagacattggtagacacagtgcttctgttggacacacgtacccagcaatatcagttgtaagcacagatgatgatctagcttga

SEQ ID NO: 275 - DNA, 2503 bp, Artificial sequence
  A novel predicted alternative spliced variant
  misc_feature (2146)..(2146): n is a, c, g, or t
atgggcacgtccgcgctctgggcgctctggctgctgctcgcgctgtgctgggcgccccgggagagcggcgccaccggaaccgggagaaaagccaaatgtgaaccctcccaattccagtgcacaaatggtcgctgtattacgctgttgtggaaatgtgatggggatgaagactgtgttgacggcagtgatgaaaagaactgtgtaaagaagacgtgtgctgaatctgacttcgtgtgcaacaatggccagtgtgttcccagccgatggaagtgtgatggagatcctgactgcgaagatggttcagatgaaagcccagaacagtgccatatgagaacatgccgcatacatgaaatcagctgtggcgcccattctactcagtgtatcccagtgtcctggagatgtgatggtgaaaatgattgtgacagtggagaagatgaagaaaactgtggcaatataacatgtagtcccgacgagttcacctgctccagtggccgctgcatctccaggaactttgtttgcaatggccaggatgactgcagcgatggcagtgatgagctggactgtgccccgccaacctgtggcgcccatgagttccagtgcagcacctcctcctgcatccccatcagctgggtatgcgacgatgatgcagactgctccgaccaatctgatgagtccctggagcagtgtggccgtcagccagtcatacacaccaagtgtccagccagcgaaatccagtgcggctctggcgagtgcatccataagaagtggcgatgtgatggggaccctgactgcaaggatggcagtgatgaggtcaactgtccctctcgaacttgccgacctgaccaatttgaatgtgaggatggcagctgcatccatggcagcaggcagtgtaatggtatccgagactgtgtcgatggttccgatgaagtcaactgcaaaaatgtcaatcagtgcttgggccctggaaaattcaagtgcagaagtggagaatgcatagatatcagcaaagtatgtaaccaggagcaggactgcagggactggagtgatgagcccctgaaagagtgtcatataaacgaatgcttggtaaataatggtggatgttctcatatctgcaaagacctagttataggctacgagtgtgactgtgcagctgggtttgaactgatagataggaaaacctgtggagatattgatgaatgccaaaatccaggaatctgcagtcaaatttgtatcaacttaaaaggcggttacaagtgtgaatgtagtcgtggctatcaaatggatcttgctactggcgtgtgcaaggcagtaggcaaagagccaagtctgatcttcactaatcgaagagacatcaggaagattggcttagagaggaaagaatatatccaactagttgaacagctaagaaacactgtggctctcgatgctgacattgctgcccagaaactattctgggccgatctaagccaaaaggctatcttcagtgcctcaattgatgacaaggttggtagacatgttaaaatgatcgacaatgtctataatcctgcagccattgctgttgattgggtgtacaagaccatctactggactgatgcggcttctaagactatttcagtagctaccctagatggaaccaagaggaagttcctgtttaactctgacttgcgagagcctgcctccatagctgtggacccactgtctggaccttataaaaagtcgcctctattggcttgattctaagttgcacatgttatccagcgtggacttgaatggccaagatcgtaggatagtactaaagtctctggagttcctagctcatcctcttgcactaacaatatttgaggatcgtgtctactggatagatggggaaaatgaagcagtctatggtgccaataaattcactggatcagagctagccactctagtcaacaacctgaatgatgcccaagacatcattgtctatcatgaacttgtacagccatcaggtaaaaattggtgtgaagaagacatggagaatggaggatgtgaatacctatgcctgccagcaccacaaattaatgatcactctccaaaatatacctgttcctgtcccagtgggtacaatgtagaggaaaatggccgagactgtcaaagtactgcaactacngtgacttacagtgagacaaaagatacgaacacaacagaaatttcagcaactagtggactagttcctggagggatcaatgtgaccacagcagtatcagaggtcagtgttcccccaaaagggacttctgccgcatgggccattcttcctctcttgctcttagtgatggcagcagtaggtggctacttgatgtggcggaattggcaacacaagaacatgaaaagcatgaactttgacaatcctgtgtacttgaaaaccactgaagaggacctctccatagacattggtagacacagtgcttctgttggacacacgtacccagcaatatcagttgtaagcacagatgatgatctagcttga

SEQ ID NO: 276 - DNA, 2480 bp, Artificial sequence
  A novel predicted alternative spliced variant
  misc_feature (2123)..(2123): n is a, c, g, or t
atgggcacgtccgcgctctgggcgctctggctgctgctcgcgctgtgctgggcgccccgggagagcggcgccaccggaaccgggagaaaagccaaatgtgaaccctcccaattccagtgcacaaatggtcgctgtattacgctgttgtggaaatgtgatggggatgaagactgtgttgacggcagtgatgaaaagaactgtgtaaagaagacgtgtgctgaatctgacttcgtgtgcaacaatggccagtgtgttcccagccgatggaagtgtgatggagatcctgactgcgaagatggttcagatgaaagcccagaacagtgccatatgagaacatgccgcatacatgaaatcagctgtggcgcccattctactcagtgtatcccagtgtcctggagatgtgatggtgaaaatgattgtgacagtggagaagatgaagaaaactgtggcaatataacatgtagtcccgacgagttcacctgctccagtggccgctgcatctccaggaactttgtttgcaatggccaggatgactgcagcgatggcagtgatgagctggactgtgccccgccaacctgtggcgcccatgagttccagtgcagcacctcctcctgcatccccatcagctgggtatgcgacgatgatgcagactgctccgaccaatctgatgagtccctggagcagtgtggccgtcagccagtcatacacaccaagtgtccagccagcgaaatccagtgcggctctggcgagtgcatccataagaagtggcgatgtgatggggaccctgactgcaaggatggcagtgatgaggtcaactgtccctctcgaacttgccgacctgaccaatttgaatgtgaggatggcagctgcatccatggcagcaggcagtgtaatggtatccgagactgtgtcgatggttccgatgaagtcaactgcaaaaatgtcaatcagtgcttgggccctggaaaattcaagtgcagaagtggagaatgcatagatatcagcaaagtatgtaaccaggagcaggactgcagggactggagtgatgagcccctgaaagagtgtcatataaacgaatgcttggtaaataatggtggatgttctcatatctgcaaagacctagttataggctacgagtgtgactgtgcagctgggtttgaactgatagataggaaaacctgtggagatattgatgaatgccaaaatccaggaatctgcagtcaaatttgtatcaacttaaaaggcggttacaagtgtgaatgtagtcgtggctatcaaatggatcttgctactggcgtgtgcaaggcagtaggcaaagagccaagtctgatcttcactaatcgaagagacatcaggaagattggcttagagaggaaagaatatatccaactagttgaacagctaagaaacactgtggctctcgatgctgacattgctgcccagaaactattctgggccgatctaagccaaaaggctatcttcagtgcctcaattgatgacaaggttggtagacatgttaaaatgatcgacaatgtctataatcctgcagccattgctgttgattgggtgtacaagaccatctactggactgatgcggcttctaagactatttcagtagctaccctagatggaaccaagaggaagttcctgtttaactctgacttgcgagagcctgcctccatagctgtggacccactgtctggctttgtttactggtcagactggggtgaaccagctaaaatagaaaaagcaggaatgaatggattcgatagacgtccactggtgacagcggatatccagtggcctaacggaattacacttgaccttataaaaagtcgcctctattggcttgattctaagttgcacatgttatccagcgtggacttgaatggccaagatcgtaggatagtactaaagtctctggagttcctagctcatcctcttgcactaacaatatttgaggtaaaaattggtgtgaagaagacatggagaatggaggatgtgaatacctatgcctgccagcaccacaaattaatgatcactctccaaaatatacctgttcctgtcccagtgggtacaatgtagaggaaaatggccgagactgtcaaagtactgcaactacngtgacttacagtgagacaaaagatacgaacacaacagaaatttcagcaactagtggactagttcctggagggatcaatgtgaccacagcagtatcagaggtcagtgttcccccaaaagggacttctgccgcatgggccattcttcctctcttgctcttagtgatggcagcagtaggtggctacttgatgtggcggaattggcaacacaagaacatgaaaagcatgaactttgacaatcctgtgtacttgaaaaccactgaagaggacctctccatagacattggtagacacagtgcttctgttggacacacgtacccagcaatatcagttgtaagcacagatgatgatctagcttga

SEQ ID NO: 277 - DNA, 2475 bp, Artificial sequence
  A novel predicted alternative spliced variant
  misc_feature (2118)..(2118): n is a, c, g, or t
atgggcacgtccgcgctctgggcgctctggctgctgctcgcgctgtgctgggcgccccgggagagcggcgccaccggaaccgggagaaaagccaaatgtgaaccctcccaattccagtgcacaaatggtcgctgtattacgctgttgtggaaatgtgatggggatgaagactgtgttgacggcagtgatgaaaagaactgtgtaaagaagacgtgtgctgaatctgacttcgtgtgcaacaatggccagtgtgttcccagccgatggaagtgtgatggagatcctgactgcgaagatggttcagatgaaagcccagaacagtgccatatgagaacatgccgcatacatgaaatcagctgtggcgcccattctactcagtgtatcccagtgtcctggagatgtgatggtgaaaatgattgtgacagtggagaagatgaagaaaactgtggcaatataacatgtagtcccgacgagttcacctgctccagtggccgctgcatctccaggaactttgtttgcaatggccaggatgactgcagcgatggcagtgatgagctggactgtgccccgccaacctgtggcgcccatgagttccagtgcagcacctcctcctgcatccccatcagctgggtatgcgacgatgatgcagactgctccgaccaatctgatgagtccctggagcagtgtggccgtcagccagtcatacacaccaagtgtccagccagcgaaatccagtgcggctctggcgagtgcatccataagaagtggcgatgtgatggggaccctgactgcaaggatggcagtgatgaggtcaactgtccctctcgaacttgccgacctgaccaatttgaatgtgaggatggcagctgcatccatggcagcaggcagtgtaatggtatccgagactgtgtcgatggttccgatgaagtcaactgcaaaaatgtcaatcagtgcttgggccctggaaaattcaagtgcagaagtggagaatgcatagatatcagcaaagtatgtaaccaggagcaggactgcagggactggagtgatgagcccctgaaagagtgtcatataaacgaatgcttggtaaataatggtggatgttctcatatctgcaaagacctagttataggctacgagtgtgactgtgcagctgggtttgaactgatagataggaaaacctgtggagatattgatgaatgccaaaatccaggaatctgcagtcaaatttgtatcaacttaaaaggcggttacaagtgtgaatgtagtcgtggctatcaaatggatcttgctactggcgtgtgcaaggcagtaggcaaagagccaagtctgatcttcactaatcgaagagacatcaggaagattggcttagagaggaaagaatatatccaactagttgaacagctaagaaacactgtggctctcgatgctgacattgctgcccagaaactattctgggccgatctaagccaaaaggctatcttcagtgcctcaattgatgacaaggttggtagacatgttaaaatgatcgacaatgtctataatcctgcagccattgctgttgattgggtgtacaagaccatctactggactgatgcggcttctaagactatttcagtagctaccctagatggaaccaagaggaagttcctgtttaactctgacttgcgagagcctgcctccatagctgtggacccactgtctggctttgtttactggtcagactggggtgaaccagctaaaatagaaaaagcaggaatgaatggattcgatagacgtccactggtgacagcggatatccagtggcctaacggaattacacttgaccttataaaaagtcgcctctattggcttgattctaagttgcacatgttatccagcgtggacttgaatggccaagatcgtaggatagtactaaagtctctggagttcctagctcatcctcttgcactaacaatatttgaggatcgtgtctactggatagatggggaaaatgaagcagtctatggtgccaataaattcactggatcagagctagccactctagtcaacaacctgaatgatgcccaagacatcattgtctatcatgaacttgtacagccatcaggtactgcaactacngtgacttacagtgagacaaaagatacgaacacaacagaaatttcagcaactagtggactagttcctggagggatcaatgtgaccacagcagtatcagaggtcagtgttcccccaaaagggacttctgccgcatgggccattcttcctctcttgctcttagtgatggcagcagtaggtggctacttgatgtggcggaattggcaacacaagaacatgaaaagcatgaactttgacaatcctgtgtacttgaaaaccactgaagaggacctctccatagacattggtagacacagtgcttctgttggacacacgtacccagcaatatcagttgtaagcacagatgatgatctagcttga

SEQ ID NO: 278 - DNA, 2725 bp, Artificial sequence
  A novel predicted alternative spliced variant
  misc_feature (2368)..(2368): n is a, c, g, or t
atgggcacgtccgcgctctgggcgctctggctgctgctcgcgctgtgctgggcgccccgggagagcggcgccaccggaaccgggagaaaagccaaatgtgaaccctcccaattccagtgcacaaatggtcgctgtattacgctgttgtggaaatgtgatggggatgaagactgtgttgacggcagtgatgaaaagaactgtgtaaagaagacgtgtgctgaatctgacttcgtgtgcaacaatggccagtgtgttcccagccgatggaagtgtgatggagatcctgactgcgaagatggttcagatgaaagcccagaacagtgccatatgagaacatgccgcatacatgaaatcagctgtggcgcccattctactcagtgtatcccagtgtcctggagatgtgatggtgaaaatgattgtgacagtggagaagatgaagaaaactgtggcaatataacatgtagtcccgacgagttcacctgctccagtggccgctgcatctccaggaactttgtttgcaatggccaggatgactgcagcgatggcagtgatgagctggactgtgccccgccaacctgtggcgcccatgagttccagtgcagcacctcctcctgcatccccatcagctgggtatgcgacgatgatgcagactgctccgaccaatctgatgagtccctggagcagtgtggccgtcagccagtcatacacaccaagtgtccagccagcgaaatccagtgcggctctggcgagtgcatccataagaagtggcgatgtgatggggaccctgactgcaaggatggcagtgatgaggtcaactgtccctctcgaacttgccgacctgaccaatttgaatgtgaggatggcagctgcatccatggcagcaggcagtgtaatggtatccgagactgtgtcgatggttccgatgaagtcaactgcaaaaatgtcaatcagtgcttgggccctggaaaattcaagtgcagaagtggagaatgcatagatatcagcaaagtatgtaaccaggagcaggactgcagggactggagtgatgagcccctgaaagagtgtcatataaacgaatgcttggtaaataatggtggatgttctcatatctgcaaagacctagttataggctacgagtgtgactgtgcagctgggtttgaactgatagataggaaaacctgtggaggtgagtctaagaagaaaacctggaccctgcaggtgatgggaaaggatagtatgtacctagtaaggtataggagcagcaagactaattctgatttccctcccagatattgatgaatgccaaaatccaggaatctgcagtcaaatttgtatcaacttaaaaggcggttacaagtgtgaatgtagtcgtggctatcaaatggatcttgctactggcgtgtgcaaggcagtaggcaaagagccaagtctgatcttcactaatcgaagagacatcaggaagattggcttagagaggaaagaatatatccaactagttgaacagctaagaaacactgtggctctcgatgctgacattgctgcccagaaactattctgggccgatctaagccaaaaggctatcttcagtgcctcaattgatgacaaggttggtagacatgttaaaatgatcgacaatgtctataatcctgcagccattgctgttgattgggtgtacaagaccatctactggactgatgcggcttctaagactatttcagtagctaccctagatggaaccaagaggaagttcctgtttaactctgacttgcgagagcctgcctccatagctgtggacccactgtctggctttgtttactggtcagactggggtgaaccagctaaaatagaaaaagcaggaatgaatggattcgatagacgtccactggtgacagcggatatccagtggcctaacggaattacacttgaccttataaaaagtcgcctctattggcttgattctaagttgcacatgttatccagcgtggacttgaatggccaagatcgtaggatagtactaaagtctctggagttcctagctcatcctcttgcactaacaatatttgaggatcgtgtctactggatagatggggaaaatgaagcagtctatggtgccaataaattcactggatcagagctagccactctagtcaacaacctgaatgatgcccaagacatcattgtctatcatgaacttgtacagccatcaggtaaaaattggtgtgaagaagacatggagaatggaggatgtgaatacctatgcctgccagcaccacaaattaatgatcactctccaaaatatacctgttcctgtcccagtgggtacaatgtagaggaaaatggccgagactgtcaaagtactgcaactacngtgacttacagtgagacaaaagatacgaacacaacagaaatttcagcaactagtggactagttcctggagggatcaatgtgaccacagcagtatcagaggtcagtgttcccccaaaagggacttctgccgcatgggccattcttcctctcttgctcttagtgatggcagcagtaggtggctacttgatgtggcggaattggcaacacaagaacatgaaaagcatgaactttgacaatcctgtgtacttgaaaaccactgaagaggacctctccatagacattggtagacacagtgcttctgttggacacacgtacccagcaatatcagttgtaagcacagatgatgatctagcttga

SEQ ID NO: 279 - DNA, 1108 bp, Artificial sequence
  A novel predicted alternative spliced variant
atgcacttgctgggcttcttctctgtggcgtgttctctgctcgccgctgcgctgctcccgggtcctcgcgaggcgcccgccgccgccgccgccttcgagtccggactcgacctctcggacgcggagcccgacgcgggcgaggccacggcttatgcaagcaaagatctggaggagcagttacggtctgtgtccagtgtagatgaactcatgactgtactctacccagaatattggaaaatgtacaagtgtcagctaaggaaaggaggctggcaacataacagagaacaggccaacctcaactcaaggacagaagagactataaaatttgctgcagcacattataatacagagatcttgaaaagtattgataatgagtggagaaagactcaatgcatgccacgggaggtgtgtatagatgtggggaaggagtttggagtcgcgacaaacaccttctttaaacctccatgtgtgtccgtctacagatgtgggggttgctgcaatagtgaggggctgcagtgcatgaacaccagcacgagctacctcagcaagacggtgtcaggcagcgaacaagacctgccccaccaattacatgtggaataatcacatctgcagatgcctggctcaggaagattttatgttttcctcggatgctggagatgactcaacagatggattccatgacatctgtggaccaaacaaggagctggatgaagagacctgtcagtgtgtctgcagagcggggcttcggcctgccagctgtggaccccacaaagaactagacagaaactcatgccagtgtgtctgtaaaaacaaactcttccccagccaatgtggggccaaccgagaatttgatgaaaacacatgccagtgtgtatgtaaaagaacctgccccagaaatcaacccctaaatcctggaaaatgtgcctgtgaatgtacagaaagtccacagaaatgcttgttaaaaggaaagaagttccaccaccaaacatgcagctgttacagacggccatgtacgaaccgccagaaggcttgtgagccaggattttcatatagtgaagaagtgtgtcgttgtgtcccttcatattggaaaagaccacaaatgagctaa

SEQ ID NO: 280 - DNA, 3903 bp, Artificial sequence
  A novel predicted alternative spliced variant
atggtcagctactgggacaccggggtcctgctgtgcgcgctgctcagctgtctgcttctcacaggatctagttcaggttcaaaattaaaagatcctgaactgagtttaaaaggcacccagcacatcatgcaagcaggccagacactgcatctccaatgcaggggggaagcagcccataaatggtctttgcctgaaatggtgagtaaggaaagcgaaaggctgagcataactaaatctgcctgtggaagaaatggcaaacaattctgcagtactttaaccttgaacacagctcaagcaaaccacactggcttctacagctgcaaatatctagctgtacctacttcaaagaagaaggaaacagaatctgcaatctatatatttattagtgatacaggtagacctttcgtagagatgtacagtgaaatccccgaaattatacacatgactgaaggaagggagctcgtcattccctgccgggttacgtcacctaacatcactgttactttaaaaaagtttccacttgacactttgatccctgatggaaaacgcataatctgggacagtagaaagggcttcatcatatcaaatgcaacgtacaaagaaatagggcttctgacctgtgaagcaacagtcaatgggcatttgtataagacaaactatctcacacatcgacaaaccaatacaatcatagatgtccaaataagcacaccacgcccagtcaaattacttagaggccatactcttgtcctcaattgtactgctaccactcccttgaacacgagagttcaaatgacctggagttaccctgatgaaaaaaataagagagcttccgtaaggcgacgaattgaccaaagcaattcccatgccaacatattctacagtgttcttactattgacaaaatgcagaacaaagacaaaggactttatacttgtcgtgtaaggagtggaccatcattcaaatctgttaacacctcagtgcatatatatgataaagcattcatcactgtgaaacatcgaaaacagcaggtgcttgaaaccgtagctggcaagcggtcttaccggctctctatgaaagtgaaggcatttccctcgccggaagttgtatggttaaaagatgggttacctgcgactgagaaatctgctcgctatttgactcgtggctactcgttaattatcaaggacgtaactgaagaggatgcagggaattatacaatcttgctgagcataaaacagtcaaatgtgtttaaaaacctcactgccactctaattgtcaatgtgaaaccccagatttacgaaaaggccgtgtcatcgtttccagacccggctctctacccactgggcagcagacaaatcctgacttgtaccgcatatggtatccctcaacctacaatcaagtggttctggcacccctgtaaccataatcattccgaagcaaggtgtgacttttgttccaataatgaagagtcctttatcctggatgctgacagcaacatgggaaacagaattgagagcatcactcagcgcatggcaataatagaaggaaagaataagatggctagcaccttggttgtggctgactctagaatttctggaatctacatttgcatagcttccaataaagttgggactgtgggaagaaacataagcttttatatcacagatgtgccaaatgggtttcatgttaacttggaaaaaatgccgacggaaggagaggacctgaaactgtcttgcacagttaacaagttcttatacagagacgttacttggattttactgcggacagttaataacagaacaatgcactacagtattagcaagcaaaaaatggccatcactaaggagcactccatcactcttaatcttaccatcatgaatgtttccctgcaagattcaggcacctatgcctgcagagccaggaatgtatacacaggggaagaaatcctccagaagaaagaaattacaatcagagatcaggaagcaccatacctcctgcgaaacctcagtgatcacacagtggccatcagcagttccaccactttagactgtcatgctaatggtgtccccgagcctcagatcacttggtttaaaaacaaccacaaaatacaacaagagcctggaattattttaggaccaggaagcagcacgctgtttattgaaagagtcacagaagaggatgaaggtgtctatcactgcaaagccaccaaccagaagggctctgtggaaagttcagcatacctcactgttcaaggaacctcggacaagtctaatctggagctgatcactctaacatgcacctgtgtggctgcgactctcttctggctcctattaaccctccttatccgaaaaatgaaaaggtcttcttctgaaataaagactgactacctatcaattataatggacccagatgaagttcctttggatgagcagtgtgagcggctcccttatgatgccagcaagtgggagtttgcccgggagagacttaaactgggcaaatcacttggaagaggggcttttggaaaagtggttcaagcatcagcatttggcattaagaaatcacctacgtgccggactgtggctgtgaaaatgctgaaagggcctctgatggtgattgttgaatactgcaaatatggaaatctctccaactacctcaagagcaaacgtgacttattttttctcaacaaggatgcagcactacacatggagcctaagaaagaaaaaatggagccaggcctggaacaaggcaagaaaccaagactagatagcgtcaccagcagcgaaagctttgcgagctccggctttcaggaagataaaagtctgagtgatgttgaggaagaggaggattctgacggtttctacaaggagcccatcactatggaagatctgatttcttacagttttcaagtggccagaggcatggagttcctgtcttccagaaagtgcattcatcgggacctggcagcgagaaacattcttttatctgagaacaacgtggtgaagatttgtgattttggccttgcccgggatatttataagaaccccgattatgtgagaaaaggagatactcgacttcctctgaaatggatggctcccgaatctatctttgacaaaatctacagcaccaagagcgacgtgtggtcttacggagtattgctgtgggaaatcttctccttaggtgggtctccatacccaggagtacaaatggatgaggacttttgcagtcgcctgagggaaggcatgaggatgagagctcctgagtactctactcctgaaatctatcagatcatgctggactgctggcacagagacccaaaagaaaggccaagatttgcagaacttgtggaaaaactaggtgatttgcttcaagcaaatgtacaacaggatggtaaagactacatcccaatcaatgccatactgacaggaaatagtgggtttacatactcaactcctgccttctctgaggacttcttcaaggaaagtatttcagctccgaagtttaattcaggaagctctgatgatgtcagatatgtaaatgctttcaagttcatgagcctggaaagaatcaaaacctttgaagaacttttaccgaatgccacctccatgtttgatgactaccagggcgacagcagcactctgttggcctctcccatgctgaagcgcttcacctggactgacagcaaacccaaggcctcgctcaagattgacttgagagtaaccagtaaaagtaaggagtcggggctgtctgatgtcagcaggcccagtttctgccattccagctgtgggcacgtcagcgaaggcaagcgcaggttcacctacgaccacgctgagctggaaaggaaaatcgcgtgctgctccccgcccccagactacaactcggtggtcctgtactccaccccacccatctag

SEQ ID NO: 281 - DNA, 3964 bp, Artificial sequence
  A novel predicted alternative spliced variant
atgcagagcaaggtgctgctggccgtcgccctgtggctctgcgtggagacccgggccgcctctgtgggtttgcctagtgtttctcttgatctgcccaggctcagcatacaaaaagacatacttacaattaaggctaatacaactcttcaaattacttgcaggggacagagggacttggactggctttggcccaataatcagagtggcagtgagcaaagggtggaggtgactgagtgcagcgatggcctcttctgtaagacactcacaattccaaaagtgatcggaaatgacactggagcctacaagtgcttctaccgggaaactgacttggcctcggtcatttatgtctatgttcaagattacagatctccatttattgcttctgttagtgaccaacatggagtcgtgtacattactgagaacaaaaacaaaactgtggtgattccatgtctcgggtccatttcaaatctcaacgtgtcactttgtgcaagatacccagaaaagagatttgttcctgatggtaacagaatttcctgggacagcaagaagggctttactattcccagctacatgatcagctatgctggcatggtcttctgtgaagcaaaaattaatgatgaaagttaccagtctattatgtacatagttgtcgttgtagggtataggatttatgatgtggttctgagtccgtctcatggaattgaactatctgttggagaaaagcttgtcttaaattgtacagcaagaactgaactaaatgtggggattgacttcaactgggaatacccttcttcgaagcatcagcataagaaacttgtaaaccgagacctaaaaacccagtctgggagtgagatgaagaaatttttgagcaccttaactatagatggtgtaacccggagtgaccaaggattgtacacctgtgcagcatccagtgggctgatgaccaagaagaacagcacatttgtcagggtccatgaaaaaccttttgttgcttttggaagtggcatggaatctctggtggaagccacggtgggggagcgtgtcagaatccctgcgaagtaccttggttacccacccccagaaataaaatggtataaaaatggaataccccttgagtccaatcacacaattaaagcggggcatgtactgacgattatggaagtgagtgaaagagacacaggaaattacactgtcatccttaccaatcccatttcaaaggagaagcagagccatgtggtctctctggttgtgtatgtcccaccccagattggtgagaaatctctaatctctcctgtggattcctaccagtacggcaccactcaaacgctgacatgtacggtctatgccattcctcccccgcatcacatccactggtattggcagttggaggaagagtgcgccaacgagcccagccaagctgtctcagtgacaaacccatacccttgtgaagaatggagaagtgtggaggacttccagggaggaaataaaattgaagttaataaaaatcaatttgctctaattgaaggaaaaaacaaaactgtaagtacccttgttatccaagcggcaaatgtgtcagctttgtacaaatgtgaagcggtcaacaaagtcgggagaggagagagggtgatctccttccacgtgaccaggggtcctgaaattactttgcaacctgacatgcagcccactgagcaggagagcgtgtctttgtggtgcactgcagacagatctacgtttgagaacctcacatggtacaagcttggcccacagcctctgccaatccatgtgggagagttgcccacacctgtttgcaagaacttggatactctttggaaattgaatgccaccatgttctctaatagcacaaatgacattttgatcatggagcttaagaatgcatccttgcaggaccaaggagactatgtctgccttgctcaagacaggaagaccaagaaaagacattgcgtggtcaggcagctcacagtcctagagcgtgtggcacccacgatcacaggaaacctggagaatcagacgacaagtattggggaaagcatcgaagtctcatgcacggcatctgggaatccccctccacagatcatgtggtttaaagataatgagacccttgtagaagactcaggcattgtattgaaggatgggaaccggaacctcactatccgcagagtgaggaaggaggacgaaggcctctacacctgccaggcatgcagtgttcttggctgtgcaaaagtggaggcatttttcataatagaaggccaatggaggggaactgaagacaggctacttgtccatcgtcatggatccagatgaactcccattggatgaacattgtgaacgactgccttatgatgccagcaaatgggaattccccagagaccggctgaagctaggtaagcctcttggccgtggtgcctttggccaagtgattgaagcagatgcctttggaattgacaagacagcaacttgcaggacagtagcagtcaaaatgttgaaagaaggagcaacacacagtgagcatcgagctctcatgtctgaactcaagatcctcattcatattggtcaccatctcaatgtggtcaaccttctaggtgcctgtaccaagccaggagggccactcatggtgattgtggaattctgcaaatttggaaacctgtccacttacctgaggagcaagagaaatgaatttgtcccctacaagaccaaaggggcacgattccgtcaagggaaagactacgttggagcaatccctgtggatctgaaacggcgcttggacagcatcaccagtagccagagctcagccagctctggatttgtggaggagaagtccctcagtgatgtagaagaagaggaagctcctgaagatctgtataaggacttcctgaccttggagcatctcatctgttacagcttccaagtggctaagggcatggagttcttggcatcgcgaaagtgtatccacagggacctggcggcacgaaatatcctcttatcggagaagaacgtggttaaaatctgtgactttggcttggcccgggatatttataaagatccagattatgtcagaaaaggagatgctcgcctccctttgaaatggatggccccagaaacaatttttgacagagtgtacacaatccagagtgacgtctggtcttttggtgttttgctgtgggaaatattttccttaggtgcttctccatatcctggggtaaagattgatgaagaattttgtaggcgattgaaagaaggaactagaatgagggcccctgattatactacaccagaaatgtaccagaccatgctggactgctggcacggggagcccagtcagagacccacgttttcagagttggtggaacatttgggaaatctcttgcaagctaatgctcagcaggatggcaaagactacattgttcttccgatatcagagactttgagcatggaagaggattctggactctctctgcctacctcacctgtttcctgtatggaggaggaggaagtatgtgaccccaaattccattatgacaacacagcaggaatcagtcagtatctgcagaacagtaagcgaaagagccggcctgtgagtgtaaaaacatttgaagatatcccgttagaagaaccagaagtaaaagtaatcccagatgacaaccagacggacagtggtatggttcttgcctcagaagagctgaaaactttggaagacagaaccaaattatctccatcttttggtggaatggtgcccagcaaaagcagggagtctgtggcatctgaaggctcaaaccagacaagcggctaccagtccggatatcactccgatgacacagacaccaccgtgtactccagtgaggaagcagaacttttaaagctgatagagattggagtgcaaaccggtagcacagcccagattctccagcctgactcggggaccacactgagctctcctcctgtttaa

SEQ ID NO: 282 - DNA, 3935 bp, Artificial sequence
  A novel predicted alternative spliced variant
atgcagagcaaggtgctgctggccgtcgccctgtggctctgcgtggagacccgggccgcctctgtgggtttgcctagtgtttctcttgatctgcccaggctcagcatacaaaaagacatacttacaattaaggctaatacaactcttcaaattacttgcaggggacagagggacttggactggctttggcccaataatcagagtggcagtgagcaaagggtggaggtgactgagtgcagcgatggcctcttctgtaagacactcacaattccaaaagtgatcggaaatgacactggagcctacaagtgcttctaccgggaaactgacttggcctcggtcatttatgtctatgttcaagattacagatctccatttattgcttctgttagtgaccaacatggagtcgtgtacattactgagaacaaaaacaaaactgtggtgattccatgtctcgggtccatttcaaatctcaacgtgtcactttgtgcaagatacccagaaaagagatttgttcctgatggtaacagaatttcctgggacagcaagaagggctttactattcccagctacatgatcagctatgctggcatggtcttctgtgaagcaaaaattaatgatgaaagttaccagtctattatgtacatagttgtcgttgtagggtataggatttatgatgtggttctgagtccgtctcatggaattgaactatctgttggagaaaagcttgtcttaaattgtacagcaagaactgaactaaatgtggggattgacttcaactgggaatacccttcttcgaagcatcagcataagaaacttgtaaaccgagacctaaaaacccagtctgggagtgagatgaagaaatttttgagcaccttaactatagatggtgtaacccggagtgaccaaggattgtacacctgtgcagcatccagtgggctgatgaccaagaagaacagcacatttgtcagggtccatgaaaaaccttttgttgcttttggaagtggcatggaatctctggtggaagccacggtgggggagcgtgtcagaatccctgcgaagtaccttggttacccacccccagaaataaaatggtataaaaatggaataccccttgagtccaatcacacaattaaagcggggcatgtactgacgattatggaagtgagtgaaagagacacaggaaattacactgtcatccttaccaatcccatttcaaaggagaagcagagccatgtggtctctctggttgtgtatgtcccaccccagattggtgagaaatctctaatctctcctgtggattcctaccagtacggcaccactcaaacgctgacatgtacggtctatgccattcctcccccgcatcacatccactggtattggcagttggaggaagagtgcgccaacgagcccagccaagctgtctcagtgacaaacccatacccttgtgaagaatggagaagtgtggaggacttccagggaggaaataaaattgaagttaataaaaatcaatttgctctaattgaaggaaaaaacaaaactgtaagtacccttgttatccaagcggcaaatgtgtcagctttgtacaaatgtgaagcggtcaacaaagtcgggagaggagagagggtgatctccttccacgtgaccaggggtcctgaaattactttgcaacctgacatgcagcccactgagcaggagagcgtgtctttgtggtgcactgcagacagatctacgtttgagaacctcacatggtacaagcttggcccacagcctctgccaatccatgtgggagagttgcccacacctgtttgcaagaacttggatactctttggaaattgaatgccaccatgttctctaatagcacaaatgacattttgatcatggagcttaagaatgcatccttgcaggaccaaggagactatgtctgccttgctcaagacaggaagaccaagaaaagacattgcgtggtcaggcagctcacagtcctagagcgtgtggcacccacgatcacaggaaacctggagaatcagacgacaagtattggggaaagcatcgaagtctcatgcacggcatctgggaatccccctccacagatcatgtggtttaaagataatgagacccttgtagaagactcaggcattgtattgaaggatgggaaccggaacctcactatccgcagagtgaggaaggaggacgaaggcctctacacctgccaggcatgcagtgttcttggctgtgcaaaagtggaggcatttttcataatagaaggtgcccaggaaaagacgaacttggaaatcattattctagtaggcacggcggtgattgccatgttcttctggctacttcttgtcatcatcctacggaccgttaagcgggtaagcctcttggccgtggtgcctttggccaagtgattgaagcagatgcctttggaattgacaagacagcaacttgcaggacagtagcagtcaaaatgttgaaagaaggagcaacacacagtgagcatcgagctctcatgtctgaactcaagatcctcattcatattggtcaccatctcaatgtggtcaaccttctaggtgcctgtaccaagccaggagggccactcatggtgattgtggaattctgcaaatttggaaacctgtccacttacctgaggagcaagagaaatgaatttgtcccctacaagaccaaaggggcacgattccgtcaagggaaagactacgttggagcaatccctgtggatctgaaacggcgcttggacagcatcaccagtagccagagctcagccagctctggatttgtggaggagaagtccctcagtgatgtagaagaagaggaagctcctgaagatctgtataaggacttcctgaccttggagcatctcatctgttacagcttccaagtggctaagggcatggagttcttggcatcgcgaaagtgtatccacagggacctggcggcacgaaatatcctcttatcggagaagaacgtggttaaaatctgtgactttggcttggcccgggatatttataaagatccagattatgtcagaaaaggagatgctcgcctccctttgaaatggatggccccagaaacaatttttgacagagtgtacacaatccagagtgacgtctggtcttttggtgttttgctgtgggaaatattttccttaggtgcttctccatatcctggggtaaagattgatgaagaattttgtaggcgattgaaagaaggaactagaatgagggcccctgattatactacaccagaaatgtaccagaccatgctggactgctggcacggggagcccagtcagagacccacgttttcagagttggtggaacatttgggaaatctcttgcaagctaatgctcagcaggatggcaaagactacattgttcttccgatatcagagactttgagcatggaagaggattctggactctctctgcctacctcacctgtttcctgtatggaggaggaggaagtatgtgaccccaaattccattatgacaacacagcaggaatcagtcagtatctgcagaacagtaagcgaaagagccggcctgtgagtgtaaaaacatttgaagatatcccgttagaagaaccagaagtaaaagtaatcccagatgacaaccagacggacagtggtatggttcttgcctcagaagagctgaaaactttggaagacagaaccaaattatctccatcttttggtggaatggtgcccagcaaaagcagggagtctgtggcatctgaaggctcaaaccagacaagcggctaccagtccggatatcactccgatgacacagacaccaccgtgtactccagtgaggaagcagaacttttaaagctgatagagattggagtgcaaaccggtagcacagcccagattctccagcctgactcggggaccacactgagctctcctcctgtttaa

SEQ ID NO: 283 - DNA, 3919 bp, Artificial sequence
  A novel predicted alternative spliced variant
atgcagagcaaggtgctgctggccgtcgccctgtggctctgcgtggagacccgggccgcctctgtgggtttgcctagtgtttctcttgatctgcccaggctcagcatacaaaaagacatacttacaattaaggctaatacaactcttcaaattacttgcaggggacagagggacttggactggctttggcccaataatcagagtggcagtgagcaaagggtggaggtgactgagtgcagcgatggcctcttctgtaagacactcacaattccaaaagtgatcggaaatgacactggagcctacaagtgcttctaccgggaaactgacttggcctcggtcatttatgtctatgttcaagattacagatctccatttattgcttctgttagtgaccaacatggagtcgtgtacattactgagaacaaaaacaaaactgtggtgattccatgtctcgggtccatttcaaatctcaacgtgtcactttgtgcaagatacccagaaaagagatttgttcctgatggtaacagaatttcctgggacagcaagaagggctttactattcccagctacatgatcagctatgctggcatggtcttctgtgaagcaaaaattaatgatgaaagttaccagtctattatgtacatagttgtcgttgtagggtataggatttatgatgtggttctgagtccgtctcatggaattgaactatctgttggagaaaagcttgtcttaaattgtacagcaagaactgaactaaatgtggggattgacttcaactgggaatacccttcttcgaagcatcagcataagaaacttgtaaaccgagacctaaaaacccagtctgggagtgagatgaagaaatttttgagcaccttaactatagatggtgtaacccggagtgaccaaggattgtacacctgtgcagcatccagtgggctgatgaccaagaagaacagcacatttgtcagggtccatgaaaaaccttttgttgcttttggaagtggcatggaatctctggtggaagccacggtgggggagcgtgtcagaatccctgcgaagtaccttggttacccacccccagaaataaaatggtataaaaatggaataccccttgagtccaatcacacaattaaagcggggcatgtactgacgattatggaagtgagtgaaagagacacaggaaattacactgtcatccttaccaatcccatttcaaaggagaagcagagccatgtggtctctctggttgtgtatgtcccaccccagattggtgagaaatctctaatctctcctgtggattcctaccagtacggcaccactcaaacgctgacatgtacggtctatgccattcctcccccgcatcacatccactggtattggcagttggaggaagagtgcgccaacgagcccagccaagctgtctcagtgacaaacccatacccttgtgaagaatggagaagtgtggaggacttccagggaggaaataaaattgaagttaataaaaatcaatttgctctaattgaaggaaaaaacaaaactgtaagtacccttgttatccaagcggcaaatgtgtcagctttgtacaaatgtgaagcggtcaacaaagtcgggagaggagagagggtgatctccttccacgtgaccaggggtcctgaaattactttgcaacctgacatgcagcccactgagcaggagagcgtgtctttgtggtgcactgcagacagatctacgtttgagaacctcacatggtacaagcttggcccacagcctctgccaatccatgtgggagagttgcccacacctgtttgcaagaacttggatactctttggaaattgaatgccaccatgttctctaatagcacaaatgacattttgatcatggagcttaagaatgcatccttgcaggaccaaggagactatgtctgccttgctcaagacaggaagaccaagaaaagacattgcgtggtcaggcagctcacagtcctagagcgtgtggcacccacgatcacaggaaacctggagaatcagacgacaagtattggggaaagcatcgaagtctcatgcacggcatctgggaatccccctccacagatcatgtggtttaaagataatgagacccttgtagaagactcaggcattgtattgaaggatgggaaccggaacctcactatccgcagagtgaggaaggaggacgaaggcctctacacctgccaggcatgcagtgttcttggctgtgcaaaagtggaggcatttttcataatagaaggtgcccaggaaaagacgaacttggaaatcattattctagtaggcacggcggtgattgccatgttcttctggctacttcttgtcatcatcctacggaccgttaagcgggccaatggaggggaactgaagacaggctacttgtccatcgtcatggatccagatgaactcccattggatgaacattgtgaacgactgccttatgatgccagcaaatgggaattccccagagaccggctgaagctaggtaagcctcttggccgtggtgcctttggccaagtgattgaagcagatgcctttggaattgacaagacagcaacttgcaggacagtagcagtcaaaatgttgaaagaaggagcaacacacagtgagcatcgagctctcatgtctgaactcaagatcctcattcatattggtcaccatctcaatgtggtcaaccttctaggtgcctgtaccaagccaggagggccactcatggtgattgtggaattctgcaaatttggaaacctgtccacttacctgaggagcaagagaaatgaatttgtcccctacaagaccaaaggggcacgattccgtcaagggaaagactacgttggagcaatccctgtggatctgaaacggcgcttggacagcatcaccagtagccagagctcagccagctctggatttgtggaggagaagtccctcagtgatgtagaagaagaggaagctcctgaagatctgtataaggacttcctgaccttggagcatctcatctgttacagcttccaagtggctaagggcatggagttcttggcatcgcgaaagtgtatccacagggacctggcggcacgaaatatcctcttatcggagaagaacgtggttaaaatctgtgactttggcttggcccgggatatttataaagatccagattatgtcagaaaaggagatgctcgcctccctttgaaatggatggccccagaaacaatttttgacagagtgtacacaatccagagtgacgtctggtcttttggtgttttgctgtgggaaatattttccttaggtgcttctccatatcctggggtaaagattgatgaagaattttgtaggcgattgaaagaaggaactagaatgagggcccctgattatactacaccagaaatgtaccagaccatgctggactgctggcacggggagcccagtcagagacccacgttttcagagttggtggaacatttgggaaatctcttgcaagctaatgctcagcagtcagtatctgcagaacagtaagcgaaagagccggcctgtgagtgtaaaaacatttgaagatatcccgttagaagaaccagaagtaaaagtaatcccagatgacaaccagacggacagtggtatggttcttgcctcagaagagctgaaaactttggaagacagaaccaaattatctccatcttttggtggaatggtgcccagcaaaagcagggagtctgtggcatctgaaggctcaaaccagacaagcggctaccagtccggatatcactccgatgacacagacaccaccgtgtactccagtgaggaagcagaacttttaaagctgatagagattggagtgcaaaccggtagcacagcccagattctccagcctgactcggggaccacactgagctctcctcctgtttaa

SEQ ID NO: 284 - DNA, 3971 bp, Artificial sequence
  A novel predicted alternative spliced variant
atgcagagcaaggtgctgctggccgtcgccctgtggctctgcgtggagacccgggccgcctctgtgggtttgcctagtgtttctcttgatctgcccaggctcagcatacaaaaagacatacttacaattaaggctaatacaactcttcaaattacttgcaggggacagagggacttggactggctttggcccaataatcagagtggcagtgagcaaagggtggaggtgactgagtgcagcgatggcctcttctgtaagacactcacaattccaaaagtgatcggaaatgacactggagcctacaagtgcttctaccgggaaactgacttggcctcggtcatttatgtctatgttcaagattacagatctccatttattgcttctgttagtgaccaacatggagtcgtgtacattactgagaacaaaaacaaaactgtggtgattccatgtctcgggtccatttcaaatctcaacgtgtcactttgtgcaagatacccagaaaagagatttgttcctgatggtaacagaatttcctgggacagcaagaagggctttactattcccagctacatgatcagctatgctggcatggtcttctgtgaagcaaaaattaatgatgaaagttaccagtctattatgtacatagttgtcgttgtagggtataggatttatgatgtggttctgagtccgtctcatggaattgaactatctgttggagaaaagcttgtcttaaattgtacagcaagaactgaactaaatgtggggattgacttcaactgggaatacccttcttcgaagcatcagcataagaaacttgtaaaccgagacctaaaaacccagtctgggagtgagatgaagaaatttttgagcaccttaactatagatggtgtaacccggagtgaccaaggattgtacacctgtgcagcatccagtgggctgatgaccaagaagaacagcacatttgtcagggtccatgaaaaaccttttgttgcttttggaagtggcatggaatctctggtggaagccacggtgggggagcgtgtcagaatccctgcgaagtaccttggttacccacccccagaaataaaatggtataaaaatggaataccccttgagtccaatcacacaattaaagcggggcatgtactgacgattatggaagtgagtgaaagagacacaggaaattacactgtcatccttaccaatcccatttcaaaggagaagcagagccatgtggtctctctggttgtgtatgtcccaccccagattggtgagaaatctctaatctctcctgtggattcctaccagtacggcaccactcaaacgctgacatgtacggtctatgccattcctcccccgcatcacatccactggtattggcagttggaggaagagtgcgccaacgagcccagccaagctgtctcagtgacaaacccatacccttgtgaagaatggagaagtgtggaggacttccagggaggaaataaaattgaagttaataaaaatcaatttgctctaattgaaggaaaaaacaaaactgtaagtacccttgttatccaagcggcaaatgtgtcagctttgtacaaatgtgaagcggtcaacaaagtcgggagaggagagagggtgatctccttccacgtgaccaggggtcctgaaattactttgcaacctgacatgcagcccactgagcaggagagcgtgtctttgtggtgcactgcagacagatctacgtttgagaacctcacatggtacaagcttggcccacagcctctgccaatccatgtgggagagttgcccacacctgtttgcaagaacttggatactctttggaaattgaatgccaccatgttctctaatagcacaaatgacattttgatcatggagcttaagaatgcatccttgcaggaccaaggagactatgtctgccttgctcaagacaggaagaccaagaaaagacattgcgtggtcaggcagctcacagtcctagagcgtgtggcacccacgatcacaggaaacctggagaatcagacgacaagtattggggaaagcatcgaagtctcatgcacggcatctgggaatccccctccacagatcatgtggtttaaagataatgagacccttgtagaagactcaggcattgtattgaaggatgggaaccggaacctcactatccgcagagtgaggaaggaggacgaaggcctctacacctgccaggcatgcagtgttcttggctgtgcaaaagtggaggcatttttcataatagaaggtgcccaggaaaagacgaacttggaaatcattattctagtaggcacggcggtgattgccatgttcttctggctacttcttgtcatcatcctacggaccgttaagcgggccaatggaggggaactgaagacaggctacttgtccatcgtcatggatccagatgaactcccattggatgaacattgtgaacgactgccttatgatgccagcaaatgggaattccccagagaccggctgaagctaggtaagcctcttggccgtggtgcctttggccaagtgattgaagcagatgcctttggaattgacaagacagcaacttgcaggacagtagcagtcaaaatgttgaaagaaggagcaacacacagtgagcatcgagctctcatgtctgaactcaagatcctcattcatattggtcaccatctcaatgtggtcaaccttctaggtgcctgtaccaagccaggagggccactcatggtgattgtggaattctgcaaatttggaaacctgtccacttacctgaggagcaagagaaatgaatttgtcccctacaagaccaaaggggcacgattccgtcaagggaaagactacgttggagcaatccctgtggatctgaaacggcgcttggacagcatcaccagtagccagagctcagccagctctggatttgtggaggagaagtccctcagtgatgtagaagaagaggaagctcctgaagatctgtataaggacttcctgaccttggagcatctcatctgttacagcttccaagtggctaagggcatggagttcttggcatcgcgaaagtgtatccacagggacctggcggcacgaaatatcctcttatcggagaagaacgtggttaaaatctgtgactttggcttggcccgggatatttataaagatccagattatgtcagaaaaggagatgctcgcctccctttgaaatggatggccccagaaacaatttttgacagagtgtacacaatccagagtgacgtctggtcttttggtgttttgctgtgggaaatattttccttaggtgcttctccatatcctggggtaaagattgatgaagaattttgtaggcgattgaaagaaggaactagaatgagggcccctgattatactacaccagaaatgtaccagaccatgctggactgctggcacggggagcccagtcagagacccacgttttcagagttggtggaacatttgggaaatctcttgcaagctaatgctcagcaggatggcaaagactacattgttcttccgatatcagagactttgagcatggaagaggattctggactctctctgcctacctcacctgtttcctgtatggaggaggaggaagtatgtgaccccaaattccattatgacaacacagcaggaatcaggacaaccagacggacagtggtatggttcttgcctcagaagagctgaaaactttggaagacagaaccaaattatctccatcttttggtggaatggtgcccagcaaaagcagggagtctgtggcatctgaaggctcaaaccagacaagcggctaccagtccggatatcactccgatgacacagacaccaccgtgtactccagtgaggaagcagaacttttaaagctgatagagattggagtgcaaaccggtagcacagcccagattctccagcctgactcggggaccacactgagctctcctcctgtttaa

SEQ ID NO: 285 - DNA, 3985 bp, Artificial sequence
  A novel predicted alternative spliced variant
atgcagagcaaggtgctgctggccgtcgccctgtggctctgcgtggagacccgggccgcctctgtgggtttgcctagtgtttctcttgatctgcccaggctcagcatacaaaaagacatacttacaattaaggctaatacaactcttcaaattacttgcaggggacagagggacttggactggctttggcccaataatcagagtggcagtgagcaaagggtggaggtgactgagtgcagcgatggcctcttctgtaagacactcacaattccaaaagtgatcggaaatgacactggagcctacaagtgcttctaccgggaaactgacttggcctcggtcatttatgtctatgttcaagattacagatctccatttattgcttctgttagtgaccaacatggagtcgtgtacattactgagaacaaaaacaaaactgtggtgattccatgtctcgggtccatttcaaatctcaacgtgtcactttgtgcaagatacccagaaaagagatttgttcctgatggtaacagaatttcctgggacagcaagaagggctttactattcccagctacatgatcagctatgctggcatggtcttctgtgaagcaaaaattaatgatgaaagttaccagtctattatgtacatagttgtcgttgtagggtataggatttatgatgtggttctgagtccgtctcatggaattgaactatctgttggagaaaagcttgtcttaaattgtacagcaagaactgaactaaatgtggggattgacttcaactgggaatacccttcttcgaagcatcagcataagaaacttgtaaaccgagacctaaaaacccagtctgggagtgagatgaagaaatttttgagcaccttaactatagatggtgtaacccggagtgaccaaggattgtacacctgtgcagcatccagtgggctgatgaccaagaagaacagcacatttgtcagggtccatgaaaaaccttttgttgcttttggaagtggcatggaatctctggtggaagccacggtgggggagcgtgtcagaatccctgcgaagtaccttggttacccacccccagaaataaaatggtataaaaatggaataccccttgagtccaatcacacaattaaagcggggcatgtactgacgattatggaagtgagtgaaagagacacaggaaattacactgtcatccttaccaatcccatttcaaaggagaagcagagccatgtggtctctctggttgtgtatgtcccaccccagattggtgagaaatctctaatctctcctgtggattcctaccagtacggcaccactcaaacgctgacatgtacggtctatgccattcctcccccgcatcacatccactggtattggcagttggaggaagagtgcgccaacgagcccagccaagctgtctcagtgacaaacccatacccttgtgaagaatggagaagtgtggaggacttccagggaggaaataaaattgaagttaataaaaatcaatttgctctaattgaaggaaaaaacaaaactgtaagtacccttgttatccaagcggcaaatgtgtcagctttgtacaaatgtgaagcggtcaacaaagtcgggagaggagagagggtgatctccttccacgtgaccaggggtcctgaaattactttgcaacctgacatgcagcccactgagcaggagagcgtgtctttgtggtgcactgcagacagatctacgtttgagaacctcacatggtacaagcttggcccacagcctctgccaatccatgtgggagagttgcccacacctgtttgcaagaacttggatactctttggaaattgaatgccaccatgttctctaatagcacaaatgacattttgatcatggagcttaagaatgcatccttgcaggaccaaggagactatgtctgccttgctcaagacaggaagaccaagaaaagacattgcgtggtcaggcagctcacagtcctagagcgtgtggcacccacgatcacaggaaacctggagaatcagacgacaagtattggggaaagcatcgaagtctcatgcacggcatctgggaatccccctccacagatcatgtggtttaaagataatgagacccttgtagaagactcaggcattgtattgaaggatgggaaccggaacctcactatccgcagagtgaggaaggaggacgaaggcctctacacctgccaggcatgcagtgttcttggctgtgcaaaagtggaggcatttttcataatagaaggtgcccaggaaaagacgaacttggaaatcattattctagtaggcacggcggtgattgccatgttcttctggctacttcttgtcatcatcctacggaccgttaagcgggccaatggaggggaactgaagacaggctacttgtccatcgtcatggatccagatgaactcccattggatgaacattgtgaacgactgccttatgatgccagcaaatgggaattccccagagaccggctgaagctaggtaagcctcttggccgtggtgcctttggccaagtgattgaagcagatgcctttggaattgacaagacagcaacttgcaggacagtagcagtcaaaatgttgaaagaaggagcaacacacagtgagcatcgagctctcatgtctgaactcaagatcctcattcatattggtcaccatctcaatgtggtcaaccttctaggtgcctgtaccaagccaggagggccactcatggtgattgtggaattctgcaaatttggaaacctgtccacttacctgaggagcaagagaaatgaatttgtcccctacaagaccaaaggggcacgattccgtcaagggaaagactacgttggagcaatccctgtggatctgaaacggcgcttggacagcatcaccagtagccagagctcagccagctctggatttgtggaggagaagtccctcagtgatgtagaagaagaggaagctcctgaagatctgtataaggacttcctgaccttggagcatctcatctgttacagcttccaagtggctaagggcatggagttcttggcatcgcgaaagtgtatccacagggacctggcggcacgaaatatcctcttatcggagaagaacgtggttaaaatctgtgactttggcttggcccgggatatttataaagatccagattatgtcagaaaaggagatgctcgcctccctttgaaatggatggccccagaaacaatttttgacagagtgtacacaatccagagtgacgtctggtcttttggtgttttgctgtgggaaatattttccttaggtgcttctccatatcctggggtaaagattgatgaagaattttgtaggcgattgaaagaaggaactagaatgagggcccctgattatactacaccagaaatgtaccagaccatgctggactgctggcacggggagcccagtcagagacccacgttttcagagttggtggaacatttgggaaatctcttgcaagctaatgctcagcaggatggcaaagactacattgttcttccgatatcagagactttgagcatggaagaggattctggactctctctgcctacctcacctgtttcctgtatggaggaggaggaagtatgtgaccccaaattccattatgacaacacagcaggaatcagtcagtatctgcagaacagtaagcgaaagagccggcctgtgagtgtaaaaacatttgaagatatcccgttagaagaaccagaagtaaaagtaatcccagattggaatggtgcccagcaaaagcagggagtctgtggcatctgaaggctcaaaccagacaagcggctaccagtccggatatcactccgatgacacagacaccaccgtgtactccagtgaggaagcagaacttttaaagctgatagagattggagtgcaaaccggtagcacagcccagattctccagcctgactcggggaccacactgagctctcctcctgtttaa

SEQ ID NO: 286 - DNA, 3094 bp, Artificial sequence
  A novel predicted alternative spliced variant
atggcttttccgccgcggcgacggctgcgcctcggtccccgcggcctcccgcttcttctctcgggactcctgctacctctgtgccgcgccttcaacctagacgtggacagtcctgccgagtactctggccccgagggaagttacttcggcttcgccgtggatttcttcgtgcccagcgcgtcttcccggatgtttcttctcgtgggagctcccaaagcaaacaccacccagcctgggattgtggaaggagggcaggtcctcaaatgtgactggtcttctacccgccggtgccagccaattgaatttgatgcaacaggcaatagagattatgccaaggatgatccattggaatttaagtcccatcagtggtttggagcatctgtgaggtcgaaacaggataaaattttggcctgtgccccattgtaccattggagaactgagatgaaacaggagcgagagcctgttggaacatgctttcttcaagatggaacaaagactgttgagtatgctccatgtagatcacaagatattgatgctgatggacagggattttgtcaaggaggattcagcattgattttactaaagctgacagagtacttcttggtggtcctggtagcttttattggcaaggtcagcttatttcggatcaagtggcagaaatcgtatctaaatacgaccccaatgtttacagcatcaagtataataaccaattagcaactcggactgcacaagctatttttgatgacagctatttgggttattctgtggctgtcggagatttcaatggtgatggcatagatgactttgtttcaggagttccaagagcagcaaggactttgggaatggtttatatttatgatgggaagaacatgtcctccttatacaattttactggcgagcagttatgcagatgtgtttattggagcacctctcttcatggatcgtggctctgatggcaaactccaagaggtggggcaggtctcagtgtctctacagagagcttcaggagacttccagacgacaaagctgaatggatttgaggtctttgcacggtttggcagtgccatagctcctttgggagatctggaccaggatggtttcaatgatattgcaattgctgctccatatgggggtgaagataaaaaaggaattgtttatatcttcaatggaagatcaacaggcttgaacgcagtcccatctcaaatccttgaagggcagtgggctgctcgaagcatgccaccaagctttggctattcaatgaaaggagccacagatatagacaaaaatggatatccagacttaattgtaggagcttttggtgtagatcgagctatcttatacagggccagaccagttatcactgtaaatgctggtcttgaagtgtaccctagcattttaaatcaagacaataaaacctgctcactgcctggaacagctctcaaagtttcctgttttaatgttaggttctgcttaaaggcagatggcaaaggagtacttcccaggaaacttaatttccaggtggaacttcttttggataaactcaagcaaaagggagcaattcgacgagcactgtttctctacagcaggtccccaagtcactccaagaacatgactatttcaagggggggactgatgcagtgtgaggaattgatagcgtatctgcgggatgaatctgaatttagagacaaactcactccaattactatttttatggaatatcggttggattatagaacagctgctgatacaacaggcttgcaacccattcttaaccagttcacgcctgctaacattagtcgacaggctcacattctacttgactgtggtgaagacaatgtctgtaaacccaagctggaagtttctgtagatagtgatcaaaagaagatctatattggggatgacaaccctctgacattgattgttaaggctcagaatcaaggagaaggtgcctacgaagctgagctcatcgtttccattccactgcaggctgatttcatcggggttgtccgaaacaatgaagccttagcaagactttcctgtgcatttaagacagaaaaccaaactcgccaggtggtatgtgaccttggaaacccaatgaaggctggaactcaactcttagctggtcttcgtttcagtgtgcaccagcagtcagagatggatacttctgtgaaatttgacttacaaatccaaagctcaaatctatttgacaaagtaagcccagttgtatctcacaaagttgatcttgctgttttagctgcagttgagataagaggagtctcgagtcctgatcatatctttcttccgattccaaactgggagcacaaggagaaccctgagactgaagaagatgttgggccagttgttcagcacatctatgagctgagaaacaatggtccaagttcattcagcaaggcaatgctccatcttcagtggccttacaaatataataataacactctgttgtatatccttcattatgatattgatggaccaatgaactgcacttcagatatggagatcaaccctttgagaattaagatctcatctttgcaaacaactgaaaagaatgacacggttgccgggcaaggtgagcgggaccatctcatcactaagcgggatcttgccctcagtgaaggagatattcacactttgggttgtggagttgctcagtgcttgaagattgtctgccaagttgggagattagacagaggaaagagtgcaatcttgtacgtaaagtcattactgtggactgagacttttatgaataaagaaaatcagaatcattcctattctctgaagtcgtctgcttcatttaatgtcatagagtttccttataagaatcttccaattgaggatatcaccaactccacattggttaccactaatgtcacctggggcattcagccagcgcccatgcctgtgcctgtgtgggtgatcattttagcagttctagcaggattgttgctactggctgttttggtatttgtaatgtacaggatgggcttttttaaacgggtccggccacctcaagaagaacaagaaagggagcagcttcaacctcatgaaaatggtgaaggaaactcagaaacttaa

SEQ ID NO: 287 - DNA, 2999 bp, Artificial sequence
  A novel predicted alternative spliced variant
atggcttttccgccgcggcgacggctgcgcctcggtccccgcggcctcccgcttcttctctcgggactcctgctacctctgtgccgcgccttcaacctagacgtggacagtcctgccgagtactctggccccgagggaagttacttcggcttcgccgtggatttcttcgtgcccagcgcgtcttcccggatgtttcttctcgtgggagctcccaaagcaaacaccacccagcctgggattgtggaaggagggcaggtcctcaaatgtgactggtcttctacccgccggtgccagccaattgaatttgatgcaacaggcaatagagattatgccaaggatgatccattggaatttaagtcccatcagtggtttggagcatctgtgaggtcgaaacaggataaaattttggcctgtgccccattgtaccattggagaactgagatgaaacaggagcgagagcctgttggaacatgctttcttcaagatggaacaaagactgttgagtatgctccatgtagatcacaagatattgatgctgatggacagggattttgtcaaggaggattcagcattgattttactaaagctgacagagtacttcttggtggtcctggtagcttttattggcaaggtcagcttatttcggatcaagtggcagaaatcgtatctaaatacgaccccaatgtttacagcatcaagtataataaccaattagcaactcggactgcacaagctatttttgatgacagctatttgggttattctgtggctgtcggagatttcaatggtgatggcatagatgactttgtttcaggagttccaagagcagcaaggactttgggaatggtttatatttatgatgggaagaacatgtcctccttatacaattttactggcgagcagatggctgcatatttcggattttctgtagctgccactgacattaatggagatgattatgcagatgtgtttattggagcacctctcttcatggatcgtggctctgatggcaaactccaagaggtggggcaggtctcagtgtctctacagagagcttcaggagacttccagacgacaaagctgaatggatttgaggtctttgcacggtttggcagtgccatagctcctttgggagatctggaccaggatggtttcaatgatattgcaattgctgctccatatgggggtgaagataaaaaaggaattgtttatatcttcaatggaagatcaacaggcttgaacgcagtcccatctcaaatccttgaagggcagtgggctgctcgaagcatgccaccaagctttggctattcaatgaaaggagccacagatatagacaaaaatggatatccagacttaattgtaggagcttttggtgtagatcgagctatcttatacagggccagaccagttatcactgtaaatgctggtcttgaagtgtaccctagcattttaaatcaagacaataaaacctgctcactgcctggaacagctctcaaagtttcctgttttaatgttaggttctgcttaaaggcagatggcaaaggagtacttcccaggaaacttaatttccaggtggaacttcttttggataaactcaagcaaaagggagcaattcgacgagcactgtttctctacagcaggtccccaagtcactccaagaacatgactatttcaagggggggactgatgcagtgtgaggaattgatagcgtatctgcgggatgaatctgaatttagagacaaactcactccaattactatttttatggaatatcggttggattatagaacagctgctgatacaacaggcttgcaacccattcttaaccagttcacgcctgctaacattagtcgacaggctcacattctacttgactgtggtgaagacaatgtctgtaaacccaagctggaagtttctgtagataggccttagcaagactttcctgtgcatttaagacagaaaaccaaactcgccaggtggtatgtgaccttggaaacccaatgaaggctggaactcaactcttagctggtcttcgtttcagtgtgcaccagcagtcagagatggatacttctgtgaaatttgacttacaaatccaaagctcaaatctatttgacaaagtaagcccagttgtatctcacaaagttgatcttgctgttttagctgcagttgagataagaggagtctcgagtcctgatcatatctttcttccgattccaaactgggagcacaaggagaaccctgagactgaagaagatgttgggccagttgttcagcacatctatgagctgagaaacaatggtccaagttcattcagcaaggcaatgctccatcttcagtggccttacaaatataataataacactctgttgtatatccttcattatgatattgatggaccaatgaactgcacttcagatatggagatcaaccctttgagaattaagatctcatctttgcaaacaactgaaaagaatgacacggttgccgggcaaggtgagcgggaccatctcatcactaagcgggatcttgccctcagtgaaggagatattcacactttgggttgtggagttgctcagtgcttgaagattgtctgccaagttgggagattagacagaggaaagagtgcaatcttgtacgtaaagtcattactgtggactgagacttttatgaataaagaaaatcagaatcattcctattctctgaagtcgtctgcttcatttaatgtcatagagtttccttataagaatcttccaattgaggatatcaccaactccacattggttaccactaatgtcacctggggcattcagccagcgcccatgcctgtgcctgtgtgggtgatcattttagcagttctagcaggattgttgctactggctgttttggtatttgtaatgtacaggatgggcttttttaaacgggtccggccacctcaagaagaacaagaaagggagcagcttcaacctcatgaaaatggtgaaggaaactcagaaacttaa

SEQ ID NO: 288 - DNA, 3054 bp, Artificial sequence
  A novel predicted alternative spliced variant
atggcttttccgccgcggcgacggctgcgcctcggtccccgcggcctcccgcttcttctctcgggactcctgctacctctgtgccgcgccttcaacctagacgtggacagtcctgccgagtactctggccccgagggaagttacttcggcttcgccgtggatttcttcgtgcccagcgcgtcttcccggatgtttcttctcgtgggagctcccaaagcaaacaccacccagcctgggattgtggaaggagggcaggtcctcaaatgtgactggtcttctacccgccggtgccagccaattgaatttgatgcaacaggcaatagagattatgccaaggatgatccattggaatttaagtcccatcagtggtttggagcatctgtgaggtcgaaacaggataaaattttggcctgtgccccattgtaccattggagaactgagatgaaacaggagcgagagcctgttggaacatgctttcttcaagatggaacaaagactgttgagtatgctccatgtagatcacaagatattgatgctgatggacagggattttgtcaaggaggattcagcattgattttactaaagctgacagagtacttcttggtggtcctggtagcttttattggcaaggtcagcttatttcggatcaagtggcagaaatcgtatctaaatacgaccccaatgtttacagcatcaagtataataaccaattagcaactcggactgcacaagctatttttgatgacagctatttgggttattctgtggctgtcggagatttcaatggtgatggcatagatgactttgtttcaggagttccaagagcagcaaggactttgggaatggtttatatttatgatgggaagaacatgtcctccttatacaattttactggcgagcagatggctgcatatttcggattttctgtagctgccactgacattaatggagatgattatgcagatgtgtttattggagcacctctcttcatggatcgtggctctgatggcaaactccaagaggtggggcaggtctcagtgtctctacagagagcttcaggagacttccagacgacaaagctgaatggatttgaggtctttgcacggtttggcagtgccatagctcctttgggagatctggaccaggatggtttcaatgatattgcaattgctgctccatatgggggtgaagataaaaaaggaattgtttatatcttcaatggaagatcaacaggcttgaacgcagtcccatctcaaatccttgaagggcagtgggctgctcgaagcatgccaccaagctttggctattcaatgaaaggagccacagatatagacaaaaatggatatccagacttaattgtaggagcttttggtgtagatcgagctatcttatacagggccagaccagttatcactgtaaatgctggtcttgaagtgtaccctagcattttaaatcaagacaataaaacctgctcactgcctggaacagctctcaaagtttcctgttttaatgttaggttctgcttaaaggcagatggcaaaggagtacttcccaggaaacttaatttccaggtggaacttcttttggataaactcaagcaaaagggagcaattcgacgagcactgtttctctacagcaggtccccaagtcactccaagaacatgactatttcaagggggggactgatgcagtgtgaggaattgatagcgtatctgcgggatgaatctgaatttagagacaaactcactccaattactatttttatggaatatcggttggattatagaacagctgctgatacaacaggcttgcaacccattcttaaccagttcacgcctgctaacattagtcgacaggctcacattctacttgactgtggtgaagacaatgtctgtaaacccaagctggaagtttctgtagatagtgatcaaaagaagatctatattggggatgacaaccctctgacattgattgttaaggctcagaatcaaggagaaggtgcctacgaagctgagctcatcgtttccattccactgcaggctgatttcatcggggttgtccgaaacaatgaactcttagctggtcttcgtttcagtgtgcaccagcagtcagagatggatacttctgtgaaatttgacttacaaatccaaagctcaaatctatttgacaaagtaagcccagttgtatctcacaaagttgatcttgctgttttagctgcagttgagataagaggagtctcgagtcctgatcatatctttcttccgattccaaactgggagcacaaggagaaccctgagactgaagaagatgttgggccagttgttcagcacatctatgagctgagaaacaatggtccaagttcattcagcaaggcaatgctccatcttcagtggccttacaaatataataataacactctgttgtatatccttcattatgatattgatggaccaatgaactgcacttcagatatggagatcaaccctttgagaattaagatctcatctttgcaaacaactgaaaagaatgacacggttgccgggcaaggtgagcgggaccatctcatcactaagcgggatcttgccctcagtgaaggagatattcacactttgggttgtggagttgctcagtgcttgaagattgtctgccaagttgggagattagacagaggaaagagtgcaatcttgtacgtaaagtcattactgtggactgagacttttatgaataaagaaaatcagaatcattcctattctctgaagtcgtctgcttcatttaatgtcatagagtttccttataagaatcttccaattgaggatatcaccaactccacattggttaccactaatgtcacctggggcattcagccagcgcccatgcctgtgcctgtgtgggtgatcattttagcagttctagcaggattgttgctactggctgttttggtatttgtaatgtacaggatgggcttttttaaacgggtccggccacctcaagaagaacaagaaagggagcagcttcaacctcatgaaaatggtgaaggaaactcagaaacttaa

SEQ ID NO: 289 - DNA, 2988 bp, Artificial sequence
  A novel predicted alternative spliced variant
atggcttttccgccgcggcgacggctgcgcctcggtccccgcggcctcccgcttcttctctcgggactcctgctacctctgtgccgcgccttcaacctagacgtggacagtcctgccgagtactctggccccgagggaagttacttcggcttcgccgtggatttcttcgtgcccagcgcgtcttcccggatgtttcttctcgtgggagctcccaaagcaaacaccacccagcctgggattgtggaaggagggcaggtcctcaaatgtgactggtcttctacccgccggtgccagccaattgaatttgatgcaacaggcaatagagattatgccaaggatgatccattggaatttaagtcccatcagtggtttggagcatctgtgaggtcgaaacaggataaaattttggcctgtgccccattgtaccattggagaactgagatgaaacaggagcgagagcctgttggaacatgctttcttcaagatggaacaaagactgttgagtatgctccatgtagatcacaagatattgatgctgatggacagggattttgtcaaggaggattcagcattgattttactaaagctgacagagtacttcttggtggtcctggtagcttttattggcaaggtcagcttatttcggatcaagtggcagaaatcgtatctaaatacgaccccaatgtttacagcatcaagtataataaccaattagcaactcggactgcacaagctatttttgatgacagctatttgggttattctgtggctgtcggagatttcaatggtgatggcatagatgactttgtttcaggagttccaagagcagcaaggactttgggaatggtttatatttatgatgggaagaacatgtcctccttatacaattttactggcgagcagatggctgcatatttcggattttctgtagctgccactgacattaatggagatgattatgcagatgtgtttattggagcacctctcttcatggatcgtggctctgatggcaaactccaagaggtggggcaggtctcagtgtctctacagagagcttcaggagacttccagacgacaaagctgaatggatttgaggtctttgcacggtttggcagtgccatagctcctttgggagatctggaccaggatggtttcaatgatattgcaattgctgctccatatgggggtgaagataaaaaaggaattgtttatatcttcaatggaagatcaacaggcttgaacgcagtcccatctcaaatccttgaagggcagtgggctgctcgaagcatgccaccaagctttggctattcaatgaaaggagccacagatatagacaaaaatggatatccagacttaattgtaggagcttttggtgtagatcgagctatcttatacagggccagaccagttatcactgtaaatgctggtcttgaagtgtaccctagcattttaaatcaagacaataaaacctgctcactgcctggaacagctctcaaagtttcctgttttaatgttaggttctgcttaaaggcagatggcaaaggagtacttcccaggaaacttaatttccaggtggaacttcttttggataaactcaagcaaaagggagcaattcgacgagcactgtttctctacagcaggtccccaagtcactccaagaacatgactatttcaagggggggactgatgcagtgtgaggaattgatagcgtatctgcgggatgaatctgaatttagagacaaactcactccaattactatttttatggaatatcggttggattatagaacagctgctgatacaacaggcttgcaacccattcttaaccagttcacgcctgctaacattagtcgacaggctcacattctacttgactgtggtgaagacaatgtctgtaaacccaagctggaagtttctgtagatagtgatcaaaagaagatctatattggggatgacaaccctctgacattgattgttaaggctcagaatcaaggagaaggtgcctacgaagctgagctcatcgtttccattccactgcaggctgatttcatcggggttgtccgaaacaatgaagccttagcaagactttcctgtgcatttaagacagaaaaccaaactcgccaggtggtatgtgaccttggaaacccaatgaaggctggaactcaactcttagctggtcttcgtttcagtgtgcaccagcagtcagagatggatacttctgtgaaatttgacttacaaatccaaagctcaaatctatttgacaaagtaagcccagttgtatctcacaaagttgatcttgctgttttagctgcagttgagataagaggagtctcgagtcctgatcatatctttcttccgattccaaactgggagcacaaggagaaccctgagactgaagaagatgttgggccagttgttcagcacatctatgagatctcatctttgcaaacaactgaaaagaatgacacggttgccgggcaaggtgagcgggaccatctcatcactaagcgggatcttgccctcagtgaaggagatattcacactttgggttgtggagttgctcagtgcttgaagattgtctgccaagttgggagattagacagaggaaagagtgcaatcttgtacgtaaagtcattactgtggactgagacttttatgaataaagaaaatcagaatcattcctattctctgaagtcgtctgcttcatttaatgtcatagagtttccttataagaatcttccaattgaggatatcaccaactccacattggttaccactaatgtcacctggggcattcagccagcgcccatgcctgtgcctgtgtgggtgatcattttagcagttctagcaggattgttgctactggctgttttggtatttgtaatgtacaggatgggcttttttaaacgggtccggccacctcaagaagaacaagaaagggagcagcttcaacctcatgaaaatggtgaaggaaactcagaaacttaa

SEQ ID NO: 290 - DNA, 4080 bp, Artificial sequence
  A novel predicted alternative spliced variant
atgaaggcccccgctgtgcttgcacctggcatcctcgtgctcctgtttaccttggtgcagaggagcaatggggagtgtaaagaggcactagcaaagtccgagatgaatgtgaatatgaagtatcagcttcccaacttcaccgcggaaacacccatccagaatgtcattctacatgagcatcacattttccttggtgccactaactacatttatgttttaaatgaggaagaccttcagaaggttgctgagtacaagactgggcctgtgctggaacacccagattgtttcccatgtcaggactgcagcagcaaagccaatttatcaggaggtgtttggaaagataacatcaacatggctctagttgtcgacacctactatgatgatcaactcattagctgtggcagcgtcaacagagggacctgccagcgacatgtctttccccacaatcatactgctgacatacagtcggaggttcactgcatattctccccacagatagaagagcccagccagtgtcctgactgtgtggtgagcgccctgggagccaaagtcctttcatctgtaaaggaccggttcatcaacttctttgtaggcaataccataaattcttcttatttcccagatcatccattgcattcgatatcagtgagaaggctaaaggaaacgaaagatggttttatgtttttgacggaccagtcctacattgatgttttacctgagttcagagattcttaccccattaagtatgtccatgcctttgaaagcaacaattttatttacttcttgacggtccaaagggaaactctagatgctcagacttttcacacaagaataatcaggttctgttccataaactctggattgcattcctacatggaaatgcctctggagtgtattctcacagaaaagagaaaaaagagatccacaaagaaggaagtgtttaatatacttcaggctgcgtatgtcagcaagcctggggcccagcttgctagacaaataggagccagcctgaatgatgacattcttttcggggtgttcgcacaaagcaagccagattctgccgaaccaatggatcgatctgccatgtgtgcattccctatcaaatatgtcaacgacttcttcaacaagatcgtcaacaaaaacaatgtgagatgtctccagcatttttacggacccaatcatgagcactgctttaataggacacttctgagaaattcatcaggctgtgaagcgcgccgtgatgaatatcgaacagagtttaccacagctttgcagcgcgttgacttattcatgggtcaattcagcgaagtcctcttaacatctatatccaccttcattaaaggagacctcaccatagctaatcttgggacatcagagggtcgcttcatgcaggttgtggtttctcgatcaggaccatcaacccctcatgtgaattttctcctggactcccatccagtgtctccagaagtgattgtggagcatacattaaaccaaaatggctacacactggttatcactgggaagaagatcacgaagatcccattgaatggcttgggctgcagacatttccagtcctgcagtcaatgcctctctgccccaccctttgttcagtgtggctggtgccacgacaaatgtgtgcgatcggaggaatgcctgagcgggacatggactcaacagatctgtctgcctgcaatctacaaggttttcccaaatagtgcaccccttgaaggagggacaaggctgaccatatgtggctgggactttggatttcggaggaataataaatttgatttaaagaaaactagagttctccttggaaatgagagctgcaccttgactttaagtgagagcacgatgaatacattgaaatgcacagttggtcctgccatgaataagcatttcaatatgtccataattatttcaaatggccacgggacaacacaatacagtacattctcctatgtggatcctgtaataacaagtatttcgccgaaatacggtcctatggctggtggcactttacttactttaactggaaattacctaaacagtgggaattctagacacatttcaattggtggaaaaacatgtactttaaaaagtgtgtcaaacagtattcttgaatgttataccccagcccaaaccatttcaactgagtttgctgttaaattgaaaattgacttagccaaccgagagacaagcatcttcagttaccgtgaagatcccattgtctatgaaattcatccaaccaaatcttttattagtacttggtggaaagaacctctcaacattgtcagttttctattttgctttgccagtggtgggagcacaataacaggtgttgggaaaaacctgaattcagttagtgtcccgagaatggtcataaatgtgcatgaagcaggaaggaactttacagtggcatgtcaacatcgctctaattcagagataatctgttgtaccactccttccctgcaacagctgaatctgcaactccccctgaaaaccaaagcctttttcatgttagatgggatcctttccaaatactttgatctcatttatgtacataatcctgtgtttaagccttttgaaaagccagtgatgatctcaatgggcaatgaaaatgtactggaaattaagtggaagcaagcaatttcttcaaccgtccttggaaaagtaatagttcaaccagatcagaatttcacaggattgattgctggtgttgtctcaatatcaacagcactgttattactacttgggtttttcctgtggctgaaaaagagaaagcaaattaaagatctgggcagtgaattagttcgctacgatgcaagagtacacactcctcatttggataggcttgtaagtgcccgaagtgtaagcccaactacagaaatggtttcaaatgaatctgtagactaccgagctacttttccagaagatcagtttcctaattcatctcagaacggttcatgccgacaagtgcagtatcctctgacagacatgtcccccatcctaactagtggggactctgatatatccagtccattactgcaaaatactgtccacattgacctcagtgctctaaatccagagctggtccaggcagtgcagcatgtagtgattgggcccagtagcctgattgtgcatttcaatgaagtcataggaagagggcattttggttgtgtatatcatgggactttgttggacaatgatggcaagaaaattcactgtgctgtgaaatccttgaacagaatcactgacataggagaagtttcccaatttctgaccgagggaatcatcatgaaagattttagtcatcccaatgtcctctcgctcctgggaatctgcctgcgaagtgaagggtctccgctggtggtcctaccatacatgaaacatggagatcttcgaaatttcattcgaaatgagactcataatccaactgtaaaagatcttattggctttggtcttcaagtagccaaagcgatgaaatatcttgcaagcaaaaagtttgtccacagagacttggctgcaagaaactgtatgctggatgaaaaattcacagtcaaggttgctgattttggtcttgccagagacatgtatgataaagaatactatagtgtacacaacaaaacaggtgcaaagctgccagtgaagtggatggctttggaaagtctgcaaactcaaaagtttaccaccaagtcagatgtgtggtcctttggcgtcgtcctctgggagctgatgacaagaggagccccaccttatcctgacgtaaacacctttgatataactgtttacttgttgcaagggagaagactcctacaacccgaatactgcccagaccccttatatgaagtaatgctaaaatgctggcaccctaaagccgaaatgcgcccatccttttctgaactggtgtcccggatatcagcgatcttctctactttcattggggagcactatgtccatgtgaacgctacttatgtgaacgtaaaatgtgtcgctccgtatccttctctgttgtcatcagaagataacgctgatgatgaggtggacacacgaccagcctccttctgggagacatcatag

SEQ ID NO: 291 - DNA, 4086 bp, Artificial sequence
  A novel predicted alternative spliced variant
atgaaggcccccgctgtgcttgcacctggcatcctcgtgctcctgtttaccttggtgcagaggagcaatggggagtgtaaagaggcactagcaaagtccgagatgaatgtgaatatgaagtatcagcttcccaacttcaccgcggaaacacccatccagaatgtcattctacatgagcatcacattttccttggtgccactaactacatttatgttttaaatgaggaagaccttcagaaggttgctgagtacaagactgggcctgtgctggaacacccagattgtttcccatgtcaggactgcagcagcaaagccaatttatcaggaggtgtttggaaagataacatcaacatggctctagttgtcgacacctactatgatgatcaactcattagctgtggcagcgtcaacagagggacctgccagcgacatgtctttccccacaatcatactgctgacatacagtcggaggttcactgcatattctccccacagatagaagagcccagccagtgtcctgactgtgtggtgagcgccctgggagccaaagtcctttcatctgtaaaggaccggttcatcaacttctttgtaggcaataccataaattcttcttatttcccagatcatccattgcattcgatatcagtgagaaggctaaaggaaacgaaagatggttttatgtttttgacggaccagtcctacattgatgttttacctgagttcagagattcttaccccattaagtatgtccatgcctttgaaagcaacaattttatttacttcttgacggtccaaagggaaactctagatgctcagacttttcacacaagaataatcaggttctgttccataaactctggattgcattcctacatggaaatgcctctggagtgtattctcacagaaaagagaaaaaagagatccacaaagaaggaagtgtttaatatacttcaggctgcgtatgtcagcaagcctggggcccagcttgctagacaaataggagccagcctgaatgatgacattcttttcggggtgttcgcacaaagcaagccagattctgccgaaccaatggatcgatctgccatgtgtgcattccctatcaaatatgtcaacgacttcttcaacaagatcgtcaacaaaaacaatgtgagatgtctccagcatttttacggacccaatcatgagcactgctttaataggacacttctgagaaattcatcaggctgtgaagcgcgccgtgatgaatatcgaacagagtttaccacagctttgcagcgcgttgacttattcatgggtcaattcagcgaagtcctcttaacatctatatccaccttcattaaaggagacctcaccatagctaatcttgggacatcagagggtcgcttcatgcaggttgtggtttctcgatcaggaccatcaacccctcatgtgaattttctcctggactcccatccagtgtctccagaagtgattgtggagcatacattaaaccaaaatggctacacactggttatcactgggaagaagatcacgaagatcccattgaatggcttgggctgcagacatttccagtcctgcagtcaatgcctctctgccccaccctttgttcagtgtggctggtgccacgacaaatgtgtgcgatcggaggaatgcctgagcgggacatggactcaacagatctgtctgcctgcaatctacaaggttttcccaaatagtgcaccccttgaaggagggacaaggctgaccatatgtggctgggactttggatttcggaggaataataaatttgatttaaagaaaactagagttctccttggaaatgagagctgcaccttgactttaagtgagagcacgatgaatacattgaaatgcacagttggtcctgccatgaataagcatttcaatatgtccataattatttcaaatggccacgggacaacacaatacagtacattctcctatgtggatcctgtaataacaagtatttcgccgaaatacggtcctatggctggtggcactttacttactttaactggaaattacctaaacagtgggaattctagacacatttcaattggtggaaaaacatgtactttaaaaagtgtgtcaaacagtattcttgaatgttataccccagcccaaaccatttcaactgagtttgctgttaaattgaaaattgacttagccaaccgagagacaagcatcttcagttaccgtgaagatcccattgtctatgaaattcatccaaccaaatcttttattagtacttggtggaaagaacctctcaacattgtcagttttctattttgctttgccagtggtgggagcacaataacaggtgttgggaaaaacctgaattcagttagtgtcccgagaatggtcataaatgtgcatgaagcaggaaggaactttacagtggcatgtcaacatcgctctaattcagagataatctgttgtaccactccttccctgcaacagctgaatctgcaactccccctgaaaaccaaagcctttttcatgttagatgggatcctttccaaatactttgatctcatttatgtacataatcctgtgtttaagccttttgaaaagccagtgatgatctcaatgggcaatgaaaatgtactggaaattaagggaaatgatattgaccctgaagcagttaaaggtgaagtgttaaaagttggaaataagagctgtgagaatatacacttacattctgaagccgttttatgcacggtccccaatgacctgctgaaattgaacagcgagctaaatatagagtggaagcaagcaatttcttcaaccgtccttggaaaagtaatagttcaaccagatcagaatttcacaggattgattgctggtgttgtctcaatatcaacagcactgttattactacttgggtttttcctgtggctgaaaaagagaaagcaaattaaagatcagtttcctaattcatctcagaacggttcatgccgacaagtgcagtatcctctgacagacatgtcccccatcctaactagtggggactctgatatatccagtccattactgcaaaatactgtccacattgacctcagtgctctaaatccagagctggtccaggcagtgcagcatgtagtgattgggcccagtagcctgattgtgcatttcaatgaagtcataggaagagggcattttggttgtgtatatcatgggactttgttggacaatgatggcaagaaaattcactgtgctgtgaaatccttgaacagaatcactgacataggagaagtttcccaatttctgaccgagggaatcatcatgaaagattttagtcatcccaatgtcctctcgctcctgggaatctgcctgcgaagtgaagggtctccgctggtggtcctaccatacatgaaacatggagatcttcgaaatttcattcgaaatgagactcataatccaactgtaaaagatcttattggctttggtcttcaagtagccaaagcgatgaaatatcttgcaagcaaaaagtttgtccacagagacttggctgcaagaaactgtatgctggatgaaaaattcacagtcaaggttgctgattttggtcttgccagagacatgtatgataaagaatactatagtgtacacaacaaaacaggtgcaaagctgccagtgaagtggatggctttggaaagtctgcaaactcaaaagtttaccaccaagtcagatgtgtggtcctttggcgtcgtcctctgggagctgatgacaagaggagccccaccttatcctgacgtaaacacctttgatataactgtttacttgttgcaagggagaagactcctacaacccgaatactgcccagaccccttatatgaagtaatgctaaaatgctggcaccctaaagccgaaatgcgcccatccttttctgaactggtgtcccggatatcagcgatcttctctactttcattggggagcactatgtccatgtgaacgctacttatgtgaacgtaaaatgtgtcgctccgtatccttctctgttgtcatcagaagataacgctgatgatgaggtggacacacgaccagcctccttctgggagacatcatag

SEQ ID NO: 292 - DNA, 4117 bp, Artificial sequence
  A novel predicted alternative spliced variant
atgaaggcccccgctgtgcttgcacctggcatcctcgtgctcctgtttaccttggtgcagaggagcaatggggagtgtaaagaggcactagcaaagtccgagatgaatgtgaatatgaagtatcagcttcccaacttcaccgcggaaacacccatccagaatgtcattctacatgagcatcacattttccttggtgccactaactacatttatgttttaaatgaggaagaccttcagaaggttgctgagtacaagactgggcctgtgctggaacacccagattgtttcccatgtcaggactgcagcagcaaagccaatttatcaggaggtgtttggaaagataacatcaacatggctctagttgtcgacacctactatgatgatcaactcattagctgtggcagcgtcaacagagggacctgccagcgacatgtctttccccacaatcatactgctgacatacagtcggaggttcactgcatattctccccacagatagaagagcccagccagtgtcctgactgtgtggtgagcgccctgggagccaaagtcctttcatctgtaaaggaccggttcatcaacttctttgtaggcaataccataaattcttcttatttcccagatcatccattgcattcgatatcagtgagaaggctaaaggaaacgaaagatggttttatgtttttgacggaccagtcctacattgatgttttacctgagttcagagattcttaccccattaagtatgtccatgcctttgaaagcaacaattttatttacttcttgacggtccaaagggaaactctagatgctcagacttttcacacaagaataatcaggttctgttccataaactctggattgcattcctacatggaaatgcctctggagtgtattctcacagaaaagagaaaaaagagatccacaaagaaggaagtgtttaatatacttcaggctgcgtatgtcagcaagcctggggcccagcttgctagacaaataggagccagcctgaatgatgacattcttttcggggtgttcgcacaaagcaagccagattctgccgaaccaatggatcgatctgccatgtgtgcattccctatcaaatatgtcaacgacttcttcaacaagatcgtcaacaaaaacaatgtgagatgtctccagcatttttacggacccaatcatgagcactgctttaataggacacttctgagaaattcatcaggctgtgaagcgcgccgtgatgaatatcgaacagagtttaccacagctttgcagcgcgttgacttattcatgggtcaattcagcgaagtcctcttaacatctatatccaccttcattaaaggagacctcaccatagctaatcttgggacatcagagggtcgcttcatgcaggttgtggtttctcgatcaggaccatcaacccctcatgtgaattttctcctggactcccatccagtgtctccagaagtgattgtggagcatacattaaaccaaaatggctacacactggttatcactgggaagaagatcacgaagatcccattgaatggcttgggctgcagacatttccagtcctgcagtcaatgcctctctgccccaccctttgttcagtgtggctggtgccacgacaaatgtgtgcgatcggaggaatgcctgagcgggacatggactcaacagatctgtctgcctgcaatctacaaggttttcccaaatagtgcaccccttgaaggagggacaaggctgaccatatgtggctgggactttggatttcggaggaataataaatttgatttaaagaaaactagagttctccttggaaatgagagctgcaccttgactttaagtgagagcacgatgaatacattgaaatgcacagttggtcctgccatgaataagcatttcaatatgtccataattatttcaaatggccacgggacaacacaatacagtacattctcctatgtggatcctgtaataacaagtatttcgccgaaatacggtcctatggctggtggcactttacttactttaactggaaattacctaaacagtgggaattctagacacatttcaattggtggaaaaacatgtactttaaaaagtgtgtcaaacagtattcttgaatgttataccccagcccaaaccatttcaactgagtttgctgttaaattgaaaattgacttagccaaccgagagacaagcatcttcagttaccgtgaagatcccattgtctatgaaattcatccaaccaaatcttttattagtacttggtggaaagaacctctcaacattgtcagttttctattttgctttgccagtggtgggagcacaataacaggtgttgggaaaaacctgaattcagttagtgtcccgagaatggtcataaatgtgcatgaagcaggaaggaactttacagtggcatgtcaacatcgctctaattcagagataatctgttgtaccactccttccctgcaacagctgaatctgcaactccccctgaaaaccaaagcctttttcatgttagatgggatcctttccaaatactttgatctcatttatgtacataatcctgtgtttaagccttttgaaaagccagtgatgatctcaatgggcaatgaaaatgtactggaaattaagggaaatgatattgaccctgaagcagttaaaggtgaagtgttaaaagttggaaataagagctgtgagaatatacacttacattctgaagccgttttatgcacggtccccaatgacctgctgaaattgaacagcgagctaaatatagagtggaagcaagcaatttcttcaaccgtccttggaaaagtaatagttcaaccagatcagaatttcacaggattgattgctggtgttgtctcaatatcaacagcactgttattactacttgggtttttcctgtggctgaaaaagagaaagcaaattaaagatctgggcagtgaattagttcgctacgatgcaagagtacacactcctcatttggataggcttgtaagtgcccgaagtgtaagcccaactacagaaatggtttcaaatgaatctgtagactaccgagctacttttccagaagatcagtttcctaattcatctcagaacggttcatgccgacaagtgcagtatcctctgacagacatgtcccccatcctaactagtggggactctgatatatccagtccattactgcaaaatactgtccacattgacctcagtgctctaaatccagagctggtccaggcagtgcagcatgtagtgattgggcccagtagcctgattgtgcatttcaatgaagtcataggaagagggcattttggttgtgtatatcatgggactttgttggacaatgatggcaagaaaattcactgtgctgtgaaatccttgaacagaatcactgacataggagaagtttcccaatttctgaccgagggaatcatcatgaaagattttagtcatcccaatgtcctctcgctcctgggaatctgcctgcgaagtgaagggtctccgctggtggtcctaccatacatgaaacatggagatcttcgaaatttcattcgaaatgagactcatgctggatgaaaaattcacagtcaaggttgctgattttggtcttgccagagacatgtatgataaagaatactatagtgtacacaacaaaacaggtgcaaagctgccagtgaagtggatggctttggaaagtctgcaaactcaaaagtttaccaccaagtcagatgtgtggtcctttggcgtcgtcctctgggagctgatgacaagaggagccccaccttatcctgacgtaaacacctttgatataactgtttacttgttgcaagggagaagactcctacaacccgaatactgcccagaccccttatatgaagtaatgctaaaatgctggcaccctaaagccgaaatgcgcccatccttttctgaactggtgtcccggatatcagcgatcttctctactttcattggggagcactatgtccatgtgaacgctacttatgtgaacgtaaaatgtgtcgctccgtatccttctctgttgtcatcagaagataacgctgatgatgaggtggacacacgaccagcctccttctgggagacatcatag

SEQ ID NO: 293 - DNA, 2019 bp, Artificial sequence
  A novel predicted alternative spliced variant
atggccctgctcctggtctctttgctggcattcctgagcttgggctcaggatgtcatcatcggatctgtcactgctctaacagggtttttctctgccaagagagcaaggtgacagagattccttctgacctcccgaggaatgccattgaactgaggtttgtcctcaccaagcttcgagtcatccaaaaaggtgcattttcaggatttggggacctggagaaaatagagatctctcagaatgatgtcttggaggtgatagaggcagatgtgttctccaaccttcccaaattacatgaaattagaattgaaaaggccaacaacctgctctacatcacccctgaggccttccagaaccttcccaaccttcaatatctgttaatatccaacacaggtattaagcaccttccagatgttcacaagattcattctctccaaaaggttttacttgacattcaagataacataaacatccacacaattgaaagaaattctttcgtggggctgagctttgaaagtgtgattctgaatctaagcgataataataatttagaagaattgcctaatgatgttttccacggagcctctggaccagtcattctagatatttcaagaacaaggatccattccctgcctagctatggcttagaaaatcttaagaagctgagggccaggtcgacttacaacttaaaaaagctgcctactctggaaaagcttgtcgccctcatggaagccagcctcacctatcccagccattgctgtgcctttgcaaactggagacggcaaatctctgagcttcatccaatttgcaacaaatctattttaaggcaagaagttgattatatgactcaggctaggggtcagagatcctctctggcagaagacaatgagtccagctacagcagaggatttgacatgacgtacactgagtttgactatgacttatgcaatgaagtggttgacgtgacctgctcccctaagccagatgcattcaacccatgtgaagatatcatggggtacaacatcctcagagtcctgatatggtttatcagcatcctggccatcactgggaacatcatagtgctagtgatcctaactaccagccaatataaactcacagtccccaggttccttatgtgcaacctggcctttgctgatctctgcattggaatctacctgctgctcattgcatcagttgatatccataccaagagccaatatcacaactatgccattgactggcaaactggggcaggctgtgatgctgctggctttttcactgtctttgccagtgagctgtcagtctacactctgacagctatcaccttggaaagatggcataccatcacgcatgccatgcagctggactgcaaggtgcagctccgccatgctgccagtgtcatggtgatgggctggatttttgcttttgcagctgccctctttcccatctttggcatcagcagctacatgaaggtgagcatctgcctgcccatggatattgacagccctttgtcacagctgtatgtcatgtccctccttgtgctcaatgtcctggcctttgtggtcatctgtggctgctatatccacatctacctcacagtgcggaaccccaacatcgtgtcctcctctagtgacaccaggatcgccaagcgcatggccatgctcatcttcactgacttcctctgcatggcacccatttctttctttgccatttctgcctccctcaaggtgcccctcatcactgtgtccaaagcaaagattctgctggttctgtttcaccccatcaactcctgtgccaaccccttcctctatgccatctttaccaaaaactttcgcagagatttcttcattctgctgagcaagtgtggctgctatgaaatgcaagcccaaatttataggacagaaacttcatccactgtccacaacacccatccaaggaatggccactgctcttcagctcccagagtcaccagtggttccacttacatacttgtccctctaagtcatttagcccaaaactaa

SEQ ID NO: 294 - DNA, 2013 bp, Artificial sequence
  A novel predicted alternative spliced variant
atggccctgctcctggtctctttgctggcattcctgagcttgggctcaggatgtcatcatcggatctgtcactgctctaacagggtttttctctgccaagagagcaaggtgacagagattccttctgacctcccgaggaatgccattgaactgaggtttgtcctcaccaagcttcgagtcatccaaaaaggtgcattttcaggatttggggacctggagaaaatagagatctctcagaatgatgtcttggaggtgatagaggcagatgtgttctccaaccttcccaaattacatgaaattagaattgaaaaggccaacaacctgctctacatcacccctgaggccttccagaaccttcccaaccttcaatatctgttaatatccaacacaggtattaagcaccttccagatgttcacaagattcattctctccaaaaggttttacttgacattcaagataacataaacatccacacaattgaaagaaattctttcgtggggctgagctttgaaagtgtgattctatggctgaataagaatgggattcaagaaatacacaactgtgcattcaatggaacccaactagatgcagtagatatttcaagaacaaggatccattccctgcctagctatggcttagaaaatcttaagaagctgagggccaggtcgacttacaacttaaaaaagctgcctactctggaaaagcttgtcgccctcatggaagccagcctcacctatcccagccattgctgtgcctttgcaaactggagacggcaaatctctgagcttcatccaatttgcaacaaatctattttaaggcaagaagttgattatatgactcaggctaggggtcagagatcctctctggcagaagacaatgagtccagctacagcagaggatttgacatgacgtacactgagtttgactatgacttatgcaatgaagtggttgacgtgacctgctcccctaagccagatgcattcaacccatgtgaagatatcatggggtacaacatcctcagagtcctgatatggtttatcagcatcctggccatcactgggaacatcatagtgctagtgatcctaactaccagccaatataaactcacagtccccaggttccttatgtgcaacctggcctttgctgatctctgcattggaatctacctgctgctcattgcatcagttgatatccataccaagagccaatatcacaactatgccattgactggcaaactggggcaggctgtgatgctgctggctttttcactgtctttgccagtgagctgtcagtctacactctgacagctatcaccttggaaagatggcataccatcacgcatgccatgcagctggactgcaaggtgcagctccgccatgctgccagtgtcatggtgatgggctggatttttgcttttgcagctgccctctttcccatctttggcatcagcagctacatgaaggtgagcatctgcctgcccatggatattgacagccctttgtcacagctgtatgtcatgtccctccttgtgctcaatgtcctggcctttgtggtcatctgtggctgctatatccacatctacctcacagtgcggaaccccaacatcgtgtcctcctctagtgacaccaggatcgccaagcgcatggccatgctcatcttcactgacttcctctgcatggcacccatttctttctttgccatttctgcctccctcaaggtgcccctcatcactgtgtccaaagcaaagattctgctggttctgtttcaccccatcaactcctgtgccaaccccttcctctatgccatctttaccaaaaactttcgcagagatttcttcattctgctgagcaagtgtggctgctatgaaatgcaagcccaaatttataggacagaaacttcatccactgtccacaacacccatccaaggaatggccactgctcttcagctcccagagtcaccagtggttccacttacatacttgtccctctaagtcatttagcccaaaactaa

SEQ ID NO: 295 - DNA, 2200 bp, Artificial sequence
  A novel predicted alternative spliced variant
atggccctgctcctggtctctttgctggcattcctgagcttgggctcaggatgtcatcatcggatctgtcactgctctaacagggtttttctctgccaagagagcaaggtgacagagattccttctgacctcccgaggaatgccattgaactgaggtttgtcctcaccaagcttcgagtcatccaaaaaggtgcattttcaggatttggggacctggagaaaatagagatctctcagaatgatgtcttggaggtgatagaggcagatgtgttctccaaccttcccaaattacatgaaattagaattgaaaaggccaacaacctgctctacatcacccctgaggccttccagaaccttcccaaccttcaatatctgttaatatccaacacaggtattaagcaccttccagatgttcacaagattcattctctccaaaaggttttacttgacattcaagataacataaacatccacacaattgaaagaaattctttcgtggggctgagctttgaaagtgtgattctatggctgaataagaatgggattcaagaaatacacaactgtgcattcaatggaacccaactagatgcagctgtaagtagccctgactattcttcaaggccatttaaagggaaatggctcttacaacagcaatatttatgtggctttgtgttttccttcttctttcctcaaccccatccccaggaatctaagcgataataataatttagaagaattgcctaatgatgttttccacggagcctctggaccagtcattctagatatttcaagaacaaggatccattccctgcctagctatggcttagaaaatcttaagaagctgagggccaggtcgacttacaacttaaaaaagctgcctactctggaaaagcttgtcgccctcatggaagccagcctcacctatcccagccattgctgtgcctttgcaaactggagacggcaaatctctgagcttcatccaatttgcaacaaatctattttaaggcaagaagttgattatatgactcaggctaggggtcagagatcctctctggcagaagacaatgagtccagctacagcagaggatttgacatgacgtacactgagtttgactatgacttatgcaatgaagtggttgacgtgacctgctcccctaagccagatgcattcaacccatgtgaagatatcatggggtacaacatcctcagagtcctgatatggtttatcagcatcctggccatcactgggaacatcatagtgctagtgatcctaactaccagccaatataaactcacagtccccaggttccttatgtgcaacctggcctttgctgatctctgcattggaatctacctgctgctcattgcatcagttgatatccataccaagagccaatatcacaactatgccattgactggcaaactggggcaggctgtgatgctgctggctttttcactgtctttgccagtgagctgtcagtctacactctgacagctatcaccttggaaagatggcataccatcacgcatgccatgcagctggactgcaaggtgcagctccgccatgctgccagtgtcatggtgatgggctggatttttgcttttgcagctgccctctttcccatctttggcatcagcagctacatgaaggtgagcatctgcctgcccatggatattgacagccctttgtcacagctgtatgtcatgtccctccttgtgctcaatgtcctggcctttgtggtcatctgtggctgctatatccacatctacctcacagtgcggaaccccaacatcgtgtcctcctctagtgacaccaggatcgccaagcgcatggccatgctcatcttcactgacttcctctgcatggcacccatttctttctttgccatttctgcctccctcaaggtgcccctcatcactgtgtccaaagcaaagattctgctggttctgtttcaccccatcaactcctgtgccaaccccttcctctatgccatctttaccaaaaactttcgcagagatttcttcattctgctgagcaagtgtggctgctatgaaatgcaagcccaaatttataggacagaaacttcatccactgtccacaacacccatccaaggaatggccactgctcttcagctcccagagtcaccagtggttccacttacatacttgtccctctaagtcatttagcccaaaactaa

SEQ ID NO: 296 - DNA, 2189 bp, Artificial sequence
  A novel predicted alternative spliced variant
atggccctgctcctggtctctttgctggcattcctgagcttgggctcaggatgtcatcatcggatctgtcactgctctaacagggtttttctctgccaagagagcaaggtgacagagattccttctgacctcccgaggaatgccattgaactgaggtttgtcctcaccaagcttcgagtcatccaaaaaggtgcattttcaggatttggggacctggagaaaatagagatctctcagaatgatgtcttggaggtgatagaggcagatgtgttctccaaccttcccaaattacatgaaattagaattgaaaaggccaacaacctgctctacatcacccctgaggccttccagaaccttcccaaccttcaatatctgttaatatccaacacaggtattaagcaccttccagatgttcacaagattcattctctccaaaaggttttacttgacattcaagataacataaacatccacacaattgaaagaaattctttcgtggggctgagctttgaaagtgtgattctatggctgaataagaatgggattcaagaaatacacaactgtgcattcaatggaacccaactagatgcaggaatctaagcgataataataatttagaagaattgcctaatgatgttttccacggagcctctggaccagtcattctgaacagaaggaccaggactcctacagaaccaaatgtcctattagccaaatatccatctggccaaggtgtgttggaggaaccggagtctctctcctcatccatagatatttcaagaacaaggatccattccctgcctagctatggcttagaaaatcttaagaagctgagggccaggtcgacttacaacttaaaaaagctgcctactctggaaaagcttgtcgccctcatggaagccagcctcacctatcccagccattgctgtgcctttgcaaactggagacggcaaatctctgagcttcatccaatttgcaacaaatctattttaaggcaagaagttgattatatgactcaggctaggggtcagagatcctctctggcagaagacaatgagtccagctacagcagaggatttgacatgacgtacactgagtttgactatgacttatgcaatgaagtggttgacgtgacctgctcccctaagccagatgcattcaacccatgtgaagatatcatggggtacaacatcctcagagtcctgatatggtttatcagcatcctggccatcactgggaacatcatagtgctagtgatcctaactaccagccaatataaactcacagtccccaggttccttatgtgcaacctggcctttgctgatctctgcattggaatctacctgctgctcattgcatcagttgatatccataccaagagccaatatcacaactatgccattgactggcaaactggggcaggctgtgatgctgctggctttttcactgtctttgccagtgagctgtcagtctacactctgacagctatcaccttggaaagatggcataccatcacgcatgccatgcagctggactgcaaggtgcagctccgccatgctgccagtgtcatggtgatgggctggatttttgcttttgcagctgccctctttcccatctttggcatcagcagctacatgaaggtgagcatctgcctgcccatggatattgacagccctttgtcacagctgtatgtcatgtccctccttgtgctcaatgtcctggcctttgtggtcatctgtggctgctatatccacatctacctcacagtgcggaaccccaacatcgtgtcctcctctagtgacaccaggatcgccaagcgcatggccatgctcatcttcactgacttcctctgcatggcacccatttctttctttgccatttctgcctccctcaaggtgcccctcatcactgtgtccaaagcaaagattctgctggttctgtttcaccccatcaactcctgtgccaaccccttcctctatgccatctttaccaaaaactttcgcagagatttcttcattctgctgagcaagtgtggctgctatgaaatgcaagcccaaatttataggacagaaacttcatccactgtccacaacacccatccaaggaatggccactgctcttcagctcccagagtcaccagtggttccacttacatacttgtccctctaagtcatttagcccaaaactaa

SEQ ID NO: 297 - DNA, 2028 bp, Artificial sequence
  A novel predicted alternative spliced variant
atgaagcagcggttctcggcgctgcagctgctgaagctgctgctgctgctgcagccgccgctgccacgagcgctgcgcgaggcgctctgccctgagccctgcaactgcgtgcccgacggcgccctgcgctgccccggccccacggccggtctcactcgacttgaaatctctcagattgattccctggaaaggatagaagctaatgcctttgacaacctcctcaatttgtctgaaatactgatccagaacaccaaaaatctgagatacattgagcccggagcatttataaatcttcccggattaaaatacttgagcatctgtaacacaggcatcagaaagtttccagatgttacgaaggtcttctcctctgaatcaaatttcattctggaaatttgtgataacttacacataaccaccataccaggaaatgcttttcaagggatgaataatgaatctgtaacactcaaactatatggaaatggatttgaagaagtacaaagtcatgcattcaatgggacgacactgacttcactggagctaaaggaaaacgtacatctggagaagatgcacaatggagccttccgtggggccacagggccgaaaaccttggatatttcttccaccaaattgcaggccctgccgagctatggcctagagtccattcagaggctaattgccacgtcatcctattctctaaaaaaattgccatcaagagaaacatttgtcaatctcctggaggccacgttgacttaccccagccactgctgtgcttttagaaacttgccaacaaaagaacagaatttttcacattccatttctgaaaacttttccaaacaatgtgaaagcacagtaaggaaagtgagtaacaaaacactttattcttccatgcttgctgagagtgaactgagtggctgggactatgaatatggtttctgcttacccaagacaccccgatgtgctcctgaaccagatgcttttaatccctgtgaagacattatgggctatgacttccttagggtcctgatttggctgattaatattctagccatcatgggaaacatgactgttctttttgttctcctgacaagtcgttacaaacttacagtgcctcgttttctcatgtgcaatctctcctttgcagacttttgcatggggctctatctgctgctcatagcctcagttgattcccaaaccaagggccagtactataaccatgccatagactggcagacagggagtgggtgcagcactgctggctttttcactgtattcgcaagtgaactttctgtctacaccctcaccgtcatcactctagaaagatggcacaccatcacctatgctattcacctggaccaaaagctgcgattaagacatgccattctgattatgcttggaggatggctcttttcttctctaattgctatgttgccccttgtcggtgtcagcaattacatgaaggtcagtatttgcttccccatggatgtggaaaccactctctcacaagtctatatattaaccatcctgattctcaatgtggtggccttcttcataatttgtgcttgctacattaaaatttattttgcagttcgaaacccagaattaatggctaccaataaagatacaaagattgctaagaaaatggcaatcctcatcttcaccgatttcacctgcatggcacctatctctttttttgccatctcagctgccttcaaagtacctcttatcacagtaaccaactctaaagttttactggttcttttttatcccatcaattcttgtgccaatccatttctgtatgcaatattcactaagacattccaaagagatttctttcttttgctgagcaaatttggctgctgtaaacgtcgggctgaactttatagaaggaaagatttttcagcttacacctccaactgcaaaaatggcttcactggatcaaataagccttctcaatccaccttgaagttgtccacattgcactgtcaaggtacagctctcctagacaagactcgctacacagagtgttaa

SEQ ID NO: 298 - DNA, 2025 bp, Artificial sequence
  A novel predicted alternative spliced variant
atgaagcagcggttctcggcgctgcagctgctgaagctgctgctgctgctgcagccgccgctgccacgagcgctgcgcgaggcgctctgccctgagccctgcaactgcgtgcccgacggcgccctgcgctgccccggccccacggccggtctcactcgactatcacttgcctacctccctgtcaaagtgatcccatctcaagctttcagaggacttaatgaggtcataaaaatactgatccagaacaccaaaaatctgagatacattgagcccggagcatttataaatcttcccggattaaaatacttgagcatctgtaacacaggcatcagaaagtttccagatgttacgaaggtcttctcctctgaatcaaatttcattctggaaatttgtgataacttacacataaccaccataccaggaaatgcttttcaagggatgaataatgaatctgtaacactcaaactatatggaaatggatttgaagaagtacaaagtcatgcattcaatgggacgacactgacttcactggagctaaaggaaaacgtacatctggagaagatgcacaatggagccttccgtggggccacagggccgaaaaccttggatatttcttccaccaaattgcaggccctgccgagctatggcctagagtccattcagaggctaattgccacgtcatcctattctctaaaaaaattgccatcaagagaaacatttgtcaatctcctggaggccacgttgacttaccccagccactgctgtgcttttagaaacttgccaacaaaagaacagaatttttcacattccatttctgaaaacttttccaaacaatgtgaaagcacagtaaggaaagtgagtaacaaaacactttattcttccatgcttgctgagagtgaactgagtggctgggactatgaatatggtttctgcttacccaagacaccccgatgtgctcctgaaccagatgcttttaatccctgtgaagacattatgggctatgacttccttagggtcctgatttggctgattaatattctagccatcatgggaaacatgactgttctttttgttctcctgacaagtcgttacaaacttacagtgcctcgttttctcatgtgcaatctctcctttgcagacttttgcatggggctctatctgctgctcatagcctcagttgattcccaaaccaagggccagtactataaccatgccatagactggcagacagggagtgggtgcagcactgctggctttttcactgtattcgcaagtgaactttctgtctacaccctcaccgtcatcactctagaaagatggcacaccatcacctatgctattcacctggaccaaaagctgcgattaagacatgccattctgattatgcttggaggatggctcttttcttctctaattgctatgttgccccttgtcggtgtcagcaattacatgaaggtcagtatttgcttccccatggatgtggaaaccactctctcacaagtctatatattaaccatcctgattctcaatgtggtggccttcttcataatttgtgcttgctacattaaaatttattttgcagttcgaaacccagaattaatggctaccaataaagatacaaagattgctaagaaaatggcaatcctcatcttcaccgatttcacctgcatggcacctatctctttttttgccatctcagctgccttcaaagtacctcttatcacagtaaccaactctaaagttttactggttcttttttatcccatcaattcttgtgccaatccatttctgtatgcaatattcactaagacattccaaagagatttctttcttttgctgagcaaatttggctgctgtaaacgtcgggctgaactttatagaaggaaagatttttcagcttacacctccaactgcaaaaatggcttcactggatcaaataagccttctcaatccaccttgaagttgtccacattgcactgtcaaggtacagctctcctagacaagactcgctacacagagtgttaa

SEQ ID NO: 299 - DNA, 2025 bp, Artificial sequence
  A novel predicted alternative spliced variant
atgaagcagcggttctcggcgctgcagctgctgaagctgctgctgctgctgcagccgccgctgccacgagcgctgcgcgaggcgctctgccctgagccctgcaactgcgtgcccgacggcgccctgcgctgccccggccccacggccggtctcactcgactatcacttgcctacctccctgtcaaagtgatcccatctcaagctttcagaggacttaatgaggtcataaaaattgaaatctctcagattgattccctggaaaggatagaagctaatgcctttgacaacctcctcaatttgtctgaaatactgatccagaacaccaaaaatctgagatacattgagcccggagcatttataaatcttcccggattaaaatacttggaaatttgtgataacttacacataaccaccataccaggaaatgcttttcaagggatgaataatgaatctgtaacactcaaactatatggaaatggatttgaagaagtacaaagtcatgcattcaatgggacgacactgacttcactggagctaaaggaaaacgtacatctggagaagatgcacaatggagccttccgtggggccacagggccgaaaaccttggatatttcttccaccaaattgcaggccctgccgagctatggcctagagtccattcagaggctaattgccacgtcatcctattctctaaaaaaattgccatcaagagaaacatttgtcaatctcctggaggccacgttgacttaccccagccactgctgtgcttttagaaacttgccaacaaaagaacagaatttttcacattccatttctgaaaacttttccaaacaatgtgaaagcacagtaaggaaagtgagtaacaaaacactttattcttccatgcttgctgagagtgaactgagtggctgggactatgaatatggtttctgcttacccaagacaccccgatgtgctcctgaaccagatgcttttaatccctgtgaagacattatgggctatgacttccttagggtcctgatttggctgattaatattctagccatcatgggaaacatgactgttctttttgttctcctgacaagtcgttacaaacttacagtgcctcgttttctcatgtgcaatctctcctttgcagacttttgcatggggctctatctgctgctcatagcctcagttgattcccaaaccaagggccagtactataaccatgccatagactggcagacagggagtgggtgcagcactgctggctttttcactgtattcgcaagtgaactttctgtctacaccctcaccgtcatcactctagaaagatggcacaccatcacctatgctattcacctggaccaaaagctgcgattaagacatgccattctgattatgcttggaggatggctcttttcttctctaattgctatgttgccccttgtcggtgtcagcaattacatgaaggtcagtatttgcttccccatggatgtggaaaccactctctcacaagtctatatattaaccatcctgattctcaatgtggtggccttcttcataatttgtgcttgctacattaaaatttattttgcagttcgaaacccagaattaatggctaccaataaagatacaaagattgctaagaaaatggcaatcctcatcttcaccgatttcacctgcatggcacctatctctttttttgccatctcagctgccttcaaagtacctcttatcacagtaaccaactctaaagttttactggttcttttttatcccatcaattcttgtgccaatccatttctgtatgcaatattcactaagacattccaaagagatttctttcttttgctgagcaaatttggctgctgtaaacgtcgggctgaactttatagaaggaaagatttttcagcttacacctccaactgcaaaaatggcttcactggatcaaataagccttctcaatccaccttgaagttgtccacattgcactgtcaaggtacagctctcctagacaagactcgctacacagagtgttaa

SEQ ID NO: 300 - DNA, 2022 bp, Artificial sequence
  A novel predicted alternative spliced variant
atgaagcagcggttctcggcgctgcagctgctgaagctgctgctgctgctgcagccgccgctgccacgagcgctgcgcgaggcgctctgccctgagccctgcaactgcgtgcccgacggcgccctgcgctgccccggccccacggccggtctcactcgactatcacttgcctacctccctgtcaaagtgatcccatctcaagctttcagaggacttaatgaggtcataaaaattgaaatctctcagattgattccctggaaaggatagaagctaatgcctttgacaacctcctcaatttgtctgaaatactgatccagaacaccaaaaatctgagatacattgagcccggagcatttataaatcttcccggattaaaatacttgagcatctgtaacacaggcatcagaaagtttccagatgttacgaaggtcttctcctctgaatcaaatttcattctcaaactatatggaaatggatttgaagaagtacaaagtcatgcattcaatgggacgacactgacttcactggagctaaaggaaaacgtacatctggagaagatgcacaatggagccttccgtggggccacagggccgaaaaccttggatatttcttccaccaaattgcaggccctgccgagctatggcctagagtccattcagaggctaattgccacgtcatcctattctctaaaaaaattgccatcaagagaaacatttgtcaatctcctggaggccacgttgacttaccccagccactgctgtgcttttagaaacttgccaacaaaagaacagaatttttcacattccatttctgaaaacttttccaaacaatgtgaaagcacagtaaggaaagtgagtaacaaaacactttattcttccatgcttgctgagagtgaactgagtggctgggactatgaatatggtttctgcttacccaagacaccccgatgtgctcctgaaccagatgcttttaatccctgtgaagacattatgggctatgacttccttagggtcctgatttggctgattaatattctagccatcatgggaaacatgactgttctttttgttctcctgacaagtcgttacaaacttacagtgcctcgttttctcatgtgcaatctctcctttgcagacttttgcatggggctctatctgctgctcatagcctcagttgattcccaaaccaagggccagtactataaccatgccatagactggcagacagggagtgggtgcagcactgctggctttttcactgtattcgcaagtgaactttctgtctacaccctcaccgtcatcactctagaaagatggcacaccatcacctatgctattcacctggaccaaaagctgcgattaagacatgccattctgattatgcttggaggatggctcttttcttctctaattgctatgttgccccttgtcggtgtcagcaattacatgaaggtcagtatttgcttccccatggatgtggaaaccactctctcacaagtctatatattaaccatcctgattctcaatgtggtggccttcttcataatttgtgcttgctacattaaaatttattttgcagttcgaaacccagaattaatggctaccaataaagatacaaagattgctaagaaaatggcaatcctcatcttcaccgatttcacctgcatggcacctatctctttttttgccatctcagctgccttcaaagtacctcttatcacagtaaccaactctaaagttttactggttcttttttatcccatcaattcttgtgccaatccatttctgtatgcaatattcactaagacattccaaagagatttctttcttttgctgagcaaatttggctgctgtaaacgtcgggctgaactttatagaaggaaagatttttcagcttacacctccaactgcaaaaatggcttcactggatcaaataagccttctcaatccaccttgaagttgtccacattgcactgtcaaggtacagctctcctagacaagactcgctacacagagtgttaa

SEQ ID NO: 301 - DNA, 2031 bp, Artificial sequence
  A novel predicted alternative spliced variant
atgaagcagcggttctcggcgctgcagctgctgaagctgctgctgctgctgcagccgccgctgccacgagcgctgcgcgaggcgctctgccctgagccctgcaactgcgtgcccgacggcgccctgcgctgccccggccccacggccggtctcactcgactatcacttgcctacctccctgtcaaagtgatcccatctcaagctttcagaggacttaatgaggtcataaaaattgaaatctctcagattgattccctggaaaggatagaagctaatgcctttgacaacctcctcaatttgtctgaaatactgatccagaacaccaaaaatctgagatacattgagcccggagcatttataaatcttcccggattaaaatacttgagcatctgtaacacaggcatcagaaagtttccagatgttacgaaggtcttctcctctgaatcaaatttcattctggaaatttgtgataacttacacataaccaccataccaggaaatgcttttcaagggatgaataatgaatctgtaacactggagctaaaggaaaacgtacatctggagaagatgcacaatggagccttccgtggggccacagggccgaaaaccttggatatttcttccaccaaattgcaggccctgccgagctatggcctagagtccattcagaggctaattgccacgtcatcctattctctaaaaaaattgccatcaagagaaacatttgtcaatctcctggaggccacgttgacttaccccagccactgctgtgcttttagaaacttgccaacaaaagaacagaatttttcacattccatttctgaaaacttttccaaacaatgtgaaagcacagtaaggaaagtgagtaacaaaacactttattcttccatgcttgctgagagtgaactgagtggctgggactatgaatatggtttctgcttacccaagacaccccgatgtgctcctgaaccagatgcttttaatccctgtgaagacattatgggctatgacttccttagggtcctgatttggctgattaatattctagccatcatgggaaacatgactgttctttttgttctcctgacaagtcgttacaaacttacagtgcctcgttttctcatgtgcaatctctcctttgcagacttttgcatggggctctatctgctgctcatagcctcagttgattcccaaaccaagggccagtactataaccatgccatagactggcagacagggagtgggtgcagcactgctggctttttcactgtattcgcaagtgaactttctgtctacaccctcaccgtcatcactctagaaagatggcacaccatcacctatgctattcacctggaccaaaagctgcgattaagacatgccattctgattatgcttggaggatggctcttttcttctctaattgctatgttgccccttgtcggtgtcagcaattacatgaaggtcagtatttgcttccccatggatgtggaaaccactctctcacaagtctatatattaaccatcctgattctcaatgtggtggccttcttcataatttgtgcttgctacattaaaatttattttgcagttcgaaacccagaattaatggctaccaataaagatacaaagattgctaagaaaatggcaatcctcatcttcaccgatttcacctgcatggcacctatctctttttttgccatctcagctgccttcaaagtacctcttatcacagtaaccaactctaaagttttactggttcttttttatcccatcaattcttgtgccaatccatttctgtatgcaatattcactaagacattccaaagagatttctttcttttgctgagcaaatttggctgctgtaaacgtcgggctgaactttatagaaggaaagatttttcagcttacacctccaactgcaaaaatggcttcactggatcaaataagccttctcaatccaccttgaagttgtccacattgcactgtcaaggtacagctctcctagacaagactcgctacacagagtgttaa

SEQ ID NO: 302 - DNA, 2019 bp, Artificial sequence
  A novel predicted alternative spliced variant
atgaagcagcggttctcggcgctgcagctgctgaagctgctgctgctgctgcagccgccgctgccacgagcgctgcgcgaggcgctctgccctgagccctgcaactgcgtgcccgacggcgccctgcgctgccccggccccacggccggtctcactcgactatcacttgcctacctccctgtcaaagtgatcccatctcaagctttcagaggacttaatgaggtcataaaaattgaaatctctcagattgattccctggaaaggatagaagctaatgcctttgacaacctcctcaatttgtctgaaatactgatccagaacaccaaaaatctgagatacattgagcccggagcatttataaatcttcccggattaaaatacttgagcatctgtaacacaggcatcagaaagtttccagatgttacgaaggtcttctcctctgaatcaaatttcattctggaaatttgtgataacttacacataaccaccataccaggaaatgcttttcaagggatgaataatgaatctgtaacactcaaactatatggaaatggatttgaagaagtacaaagtcatgcattcaatgggacgacactgacttcactggagctaaaggaaaacgtacatctggagaagatgcacaatggagccttccgtggggccacagggccgaaaaccttggatatttcttccaccaaattgcaggccctgccgagctatggcctagagtccattcagaggctaattgccacgtcatcctattctctaaaaaaattgccatcaagagaaacatttgtcaatctcctggaggccacgttgacttaccccagccactgctgtgcttttagaaacttgccaacaaaagattattcttccatgcttgctgagagtgaactgagtggctgggactatgaatatggtttctgcttacccaagacaccccgatgtgctcctgaaccagatgcttttaatccctgtgaagacattatgggctatgacttccttagggtcctgatttggctgattaatattctagccatcatgggaaacatgactgttctttttgttctcctgacaagtcgttacaaacttacagtgcctcgttttctcatgtgcaatctctcctttgcagacttttgcatggggctctatctgctgctcatagcctcagttgattcccaaaccaagggccagtactataaccatgccatagactggcagacagggagtgggtgcagcactgctggctttttcactgtattcgcaagtgaactttctgtctacaccctcaccgtcatcactctagaaagatggcacaccatcacctatgctattcacctggaccaaaagctgcgattaagacatgccattctgattatgcttggaggatggctcttttcttctctaattgctatgttgccccttgtcggtgtcagcaattacatgaaggtcagtatttgcttccccatggatgtggaaaccactctctcacaagtctatatattaaccatcctgattctcaatgtggtggccttcttcataatttgtgcttgctacattaaaatttattttgcagttcgaaacccagaattaatggctaccaataaagatacaaagattgctaagaaaatggcaatcctcatcttcaccgatttcacctgcatggcacctatctctttttttgccatctcagctgccttcaaagtacctcttatcacagtaaccaactctaaagttttactggttcttttttatcccatcaattcttgtgccaatccatttctgtatgcaatattcactaagacattccaaagagatttctttcttttgctgagcaaatttggctgctgtaaacgtcgggctgaactttatagaaggaaagatttttcagcttacacctccaactgcaaaaatggcttcactggatcaaataagccttctcaatccaccttgaagttgtccacattgcactgtcaaggtacagctctcctagacaagactcgctacacagagtgttaa

SEQ ID NO: 303 - DNA, 2188 bp, Artificial sequence
  A novel predicted alternative spliced variant
atgaagcagcggttctcggcgctgcagctgctgaagctgctgctgctgctgcagccgccgctgccacgagcgctgcgcgaggcgctctgccctgagccctgcaactgcgtgcccgacggcgccctgcgctgccccggccccacggccggtctcactcgactatcacttgcctacctccctgtcaaagtgatcccatctcaagctttcagaggacttaatgaggtcataaaaattgaaatctctcagattgattccctggaaaggatagaagctaatgcctttgacaacctcctcaatttgtctgaaatactgatccagaacaccaaaaatctgagatacattgagcccggagcatttataaatcttcccggattaaaatacttgagcatctgtaacacaggcatcagaaagtttccagatgttacgaaggtcttctcctctgaatcaaatttcattctgtaagtaccaggctgattgctatgcataacagtttcctatttgcagctaaaatttagaaagtaaatatttctcatttctttcctcaagggaaatttgtgataacttacacataaccaccataccaggaaatgcttttcaagggatgaataatgaatctgtaacactcaaactatatggaaatggatttgaagaagtacaaagtcatgcattcaatgggacgacactgacttcactggagctaaaggaaaacgtacatctggagaagatgcacaatggagccttccgtggggccacagggccgaaaaccttggatatttcttccaccaaattgcaggccctgccgagctatggcctagagtccattcagaggctaattgccacgtcatcctattctctaaaaaaattgccatcaagagaaacatttgtcaatctcctggaggccacgttgacttaccccagccactgctgtgcttttagaaacttgccaacaaaagaacagaatttttcacattccatttctgaaaacttttccaaacaatgtgaaagcacagtaaggaaagtgagtaacaaaacactttattcttccatgcttgctgagagtgaactgagtggctgggactatgaatatggtttctgcttacccaagacaccccgatgtgctcctgaaccagatgcttttaatccctgtgaagacattatgggctatgacttccttagggtcctgatttggctgattaatattctagccatcatgggaaacatgactgttctttttgttctcctgacaagtcgttacaaacttacagtgcctcgttttctcatgtgcaatctctcctttgcagacttttgcatggggctctatctgctgctcatagcctcagttgattcccaaaccaagggccagtactataaccatgccatagactggcagacagggagtgggtgcagcactgctggctttttcactgtattcgcaagtgaactttctgtctacaccctcaccgtcatcactctagaaagatggcacaccatcacctatgctattcacctggaccaaaagctgcgattaagacatgccattctgattatgcttggaggatggctcttttcttctctaattgctatgttgccccttgtcggtgtcagcaattacatgaaggtcagtatttgcttccccatggatgtggaaaccactctctcacaagtctatatattaaccatcctgattctcaatgtggtggccttcttcataatttgtgcttgctacattaaaatttattttgcagttcgaaacccagaattaatggctaccaataaagatacaaagattgctaagaaaatggcaatcctcatcttcaccgatttcacctgcatggcacctatctctttttttgccatctcagctgccttcaaagtacctcttatcacagtaaccaactctaaagttttactggttcttttttatcccatcaattcttgtgccaatccatttctgtatgcaatattcactaagacattccaaagagatttctttcttttgctgagcaaatttggctgctgtaaacgtcgggctgaactttatagaaggaaagatttttcagcttacacctccaactgcaaaaatggcttcactggatcaaataagccttctcaatccaccttgaagttgtccacattgcactgtcaaggtacagctctcctagacaagactcgctacacagagtgttaa

SEQ ID NO: 304 - DNA, 567 bp, Artificial sequence
  A novel predicted alternative spliced variant
atggcggcgctggccagtagcctgatccggcagaagcgggaggtccgcgagcccgggggcagccggccggtgtcggcgcagcggcgcgtgtgtccccgcggcaccaagtccctttgccagaagcagctcctcatcctgctgtccaaggtgcgactgtgcggggggcggcccgcgcggccggaccgcggcccggcccacttcaacctgatccctgtgggcctccgtgtggtcaccatccagagcgccaagctgggtcactacatggccatgaatgctgagggactgctctacagttcgccgcatttcacagctgagtgtcgctttaaggagtgtgtctttgagaattactacgtcctgtacgcctctgctctctaccgccagcgtcgttctggccgggcctggtacctcggcctggacaaggagggccaggtcatgaagggaaaccgagttaagaagaccaaggcagctgcccactttctgcccaagctcctggaggtggccatgtaccaggagccttctctccacagtgtccccgaggcctccccttccagtccccctgccccctga

SEQ ID NO: 305 - DNA, 621 bp, Artificial sequence
  A novel predicted alternative spliced variant
atggctgcggcgatagccagctccttgatccggcagaagcggcaggcgagggagtccaacagcgaccgagtgtcggcctccaagcgccgctccagccccagcaaagacgggcgctccctgtgcgagaggcacgtcctcggggtgttcagcaaagtgcgcttctgcagcggccgcaagaggccggtgaggcggagaccagctctcttcaatctaattcccgtgggcctgcgtgtagtggccatccaaggagtgaaggctagcctctatgtggccatgaatggtgaaggctatctctacagttcagatgttttcactccagaatgcaaattcaaggaatctgtgtttgaaaactactatgtgatctattcttccacactgtaccgccagcaagaatcaggccgagcttggtttctgggactcaataaagaaggtcaaattatgaaggggaacagagtgaagaaaaccaagccctcatcacattttgtaccgaaacctattgaagtgtgtatgtacagagaaccatcgctacatgaaattggagaaaaacaagggcgttcaaggaaaagttctggaacaccaaccatgaatggaggcaaagttgtgaatcaagattcaacatag

SEQ ID NO: 306 - DNA, 435 bp, Artificial sequence
  A novel predicted alternative spliced variant
atggagagcaaagctctcttcaatctaattcccgtgggcctgcgtgtagtggccatccaaggagtgaaggctagcctctatgtggccatgaatggtgaaggctatctctacagttcagatgttttcactccagaatgcaaattcaaggaatctgtgtttgaaaactactatgtgatctattcttccacactgtaccgccagcaagaatcaggccgagcttggtttctgggactcaataaagaaggtcaaattatgaaggggaacagagtgaagaaaaccaagccctcatcacattttgtaccgaaacctattgaagtgtgtatgtacagagaaccatcgctacatgaaattggagaaaaacaagggcgttcaaggaaaagttctggaacaccaaccatgaatggaggcaaagttgtgaatcaagattcaacatag

SEQ ID NO: 307 - DNA, 627 bp, Artificial sequence
  A novel predicted alternative spliced variant
atggcggcggctatcgccagctcgctcatccgtcagaagaggcaagcccgcgagcgcgagaaatccaacgcctgcaagtgtgtcagcagccccagcaaaggcaagaccagctgcgacaaaaacaagttaaatgtcttttcccgggtcaaactcttcggctccaagaagaggcgcagaagaagaccagctctgtttaacctcatccctgtgggtctgcgagtggtggctatccaaggagttcaaaccaagctgtacttggcaatgaacagtgagggatacttgtacacctcggaacttttcacacctgagtgcaaattcaaagaatcagtgtttgaaaattattatgtgacatattcatcaatgatataccgtcagcagcagtcaggccgagggtggtatctgggtctgaacaaagaaggagagatcatgaaaggcaaccatgtgaagaagaacaagcctgcagctcattttctgcctaaaccactgaaagtggccatgtacaaggagccatcactgcacgatctcacggagttctcccgatctggaagcgggaccccaaccaagagcagaagtgtctctggcgtgctgaacggaggcaaatccatgagccacaatgaatcaacgtag

SEQ ID NO: 308 - DNA, 468 bp, Artificial sequence
  A novel predicted alternative spliced variant
atggctttgttaaggaagtcgtattcagctctgtttaacctcatccctgtgggtctgcgagtggtggctatccaaggagttcaaaccaagctgtacttggcaatgaacagtgagggatacttgtacacctcggaacttttcacacctgagtgcaaattcaaagaatcagtgtttgaaaattattatgtgacatattcatcaatgatataccgtcagcagcagtcaggccgagggtggtatctgggtctgaacaaagaaggagagatcatgaaaggcaaccatgtgaagaagaacaagcctgcagctcattttctgcctaaaccactgaaagtggccatgtacaaggagccatcactgcacgatctcacggagttctcccgatctggaagcgggaccccaaccaagagcagaagtgtctctggcgtgctgaacggaggcaaatccatgagccacaatgaatcaacgtag

SEQ ID NO: 309 - DNA, 634 bp, Artificial sequence
  A novel predicted alternative spliced variant
atggcggcggctatcgccagctcgctcatccgtcagaagaggcaagcccgcgagcgcgagaaatccaacgcctgcaagtgtgtcagcagccccagcaaaggcaagaccagctgcgacaaaaacaagttaaatgtcttttcccgggtcaaactcttcggctccaagaagaggcgcagaagaagaccagagcctcagcttaagggtatagttaccaagctatacagccgacaaggctaccacttgcagctgcaggcggatggaaccattgatggcaccaaagatgaggacagcacttacagaacttttcacacctgagtgcaaattcaaagaatcagtgtttgaaaattattatgtgacatattcatcaatgatataccgtcagcagcagtcaggccgagggtggtatctgggtctgaacaaagaaggagagatcatgaaaggcaaccatgtgaagaagaacaagcctgcagctcattttctgcctaaaccactgaaagtggccatgtacaaggagccatcactgcacgatctcacggagttctcccgatctggaagcgggaccccaaccaagagcagaagtgtctctggcgtgctgaacggaggcaaatccatgagccacaatgaatcaacgtag

SEQ ID NO: 310 - DNA, 475 bp, Artificial sequence
  A novel predicted alternative spliced variant
atggctttgttaaggaagtcgtattcagagcctcagcttaagggtatagttaccaagctatacagccgacaaggctaccacttgcagctgcaggcggatggaaccattgatggcaccaaagatgaggacagcacttacagaacttttcacacctgagtgcaaattcaaagaatcagtgtttgaaaattattatgtgacatattcatcaatgatataccgtcagcagcagtcaggccgagggtggtatctgggtctgaacaaagaaggagagatcatgaaaggcaaccatgtgaagaagaacaagcctgcagctcattttctgcctaaaccactgaaagtggccatgtacaaggagccatcactgcacgatctcacggagttctcccgatctggaagcgggaccccaaccaagagcagaagtgtctctggcgtgctgaacggaggcaaatccatgagccacaatgaatcaacgtag

SEQ ID NO: 311 - DNA, 552 bp, Artificial sequence
  A novel predicted alternative spliced variant
atggagttcctctgggcccctctcttgggtctgtgctgcagtctggccgctgctgatcgccacaccgtcttctggaacagttcaaatcccaagttccggaatgaggactacaccatacatgtgcagctgaatgactacgtggacatcatctgtccgcactatgaagatcactctgtggcagacgctgccatggagcagtacatactgtacctggtggagcatgaggagtaccagctgtgccagccccagtccaaggaccaagtccgctggcagtgcaaccggcccagtgccaagcatggcccggagaagctgtctgagaagttccagcgcttcacacctttcaccctgggcaaggagttcaaagaaggacacagctactactacatctctcacagtcctcaggcccatgtcaatccacaggagaagagacttgcagcagatgacccagaggtgcgggttctacatagcatcggtcacagtgctgccccacgcctcttcccacttgcctggactgtgctgctccttccacttctgctgctgcaaaccccgtga

SEQ ID NO: 312 - DNA, 651 bp, Artificial sequence
  A novel predicted alternative spliced variant
atggcggcggctccgctgctgctgctgctgctgctcgtgcccgtgccgctgctgccgctgctggcccaagggcccggaggggcgctgggaaaccggcatgcggtgtactggaacagctccaaccagcacctgcggcgagagggctacaccgtgcaggtgaacgtgaacgactatctggatatttactgcccgcactacaacagctcgggggtgggccccggggcgggaccggggcccggaggcggggcagagcagtacgtgctgtacatggtgagccgcaacggctaccgcacctgcaacgccagccagggcttcaagcgctgggagtgcaaccggccgcacgccccgcacagccccatcaagttctcggagaagttccagcgctacagcgccttctctctgggctacgagttccacgccggccacgagtactactacatctcatcgcactccggggagaagccggtccccactctcccccagttcaccatgggccccaatgtgaagatcaacgtgctggaagactttgagggagagaaccctcaggtgcccaagcttgagaagagcatcagcgggaccagccccaaacgggaacacctgcccctggccgtgggcatcgccttcttcctcatgacgttcttggcctcctag

SEQ ID NO: 313 - DNA, 639 bp, Artificial sequence
  A novel predicted alternative spliced variant
atggcggcggctccgctgctgctgctgctgctgctcgtgcccgtgccgctgctgccgctgctggcccaagggcccggaggggcgctgggaaaccggcatgcggtgtactggaacagctccaaccagcacctgcggcgagagggctacaccgtgcaggtgaacgtgaacgactatctggatatttactgcccgcactacaacagctcgggggtgggccccggggcgggaccggggcccggaggcggggcagagcagtacgtgctgtacatggtgagccgcaacggctaccgcacctgcaacgccagccagggcttcaagcgctgggagtgcaaccggccgcacgccccgcacagccccatcaagttctcggagaagttccagcgctacagcgccttctctctgggctacgagttccacgccggccacgagtactactacatctccacgcccactcacaacctgcactggaagtgtctgaggatgaaggtgttcgtctgctgcgcctccaaagactttgagggagagaaccctcaggtgcccaagcttgagaagagcatcagcgggaccagccccaaacgggaacacctgcccctggccgtgggcatcgccttcttcctcatgacgttcttggcctcctag

SEQ ID NO: 314 - DNA, 621 bp, Artificial sequence
  A novel predicted alternative spliced variant
atgttgcacgtggagatgttgacgctggtgtttctggtgctctggatgtgtgtgttcagccaggacccgggctccaaggccgtcgccgaccgctacgctgtctactggaacagcagcaaccccagattccagaggggtgactaccatattgatgtctgtatcaatgactacctggatgttttctgccctcactatgaggactccgtcccagaagataagactgagcgctatgtcctctacatggtgaactttgatggctacagtgcctgcgaccacacttccaaagggttcaagagatgggaatgtaaccggcctcactctccaaatggaccgctgaagttctctgaaaaattccagctcttcactcccttttctctaggatttgaattcaggccaggccgagaatatttctacatctatagctgtatgaaaactataggtgttcatgatcgtgttttcgatgttaacgacaaagtagaaaattcattagaaccagcagatgacaccgtacatgagtcagccgagccatcccgcggcgagaacgcggcacaaacaccaaggatacccagccgccttttggcaatcctactgttcctcctggcgatgcttttgacattatag

SEQ ID NO: 315 - DNA, 606 bp, Artificial sequence
  A novel predicted alternative spliced variant
atgttgcacgtggagatgttgacgctggtgtttctggtgctctggatgtgtgtgttcagccaggacccgggctccaaggccgtcgccgaccgctacgctgtctactggaacagcagcaaccccagattccagaggggtgactaccatattgatgtctgtatcaatgactacctggatgttttctgccctcactatgaggactccgtcccagaagataagactgagcgctatgtcctctacatggtgaactttgatggctacagtgcctgcgaccacacttccaaagggttcaagagatgggaatgtaaccggcctcactctccaaatggaccgctgaagttctctgaaaaattccagctcttcactcccttttctctaggatttgaattcaggccaggccgagaatatttctacatctcctctgcaatcccagataatggaagaaggtcctgtctaaagctcaaagtctttgtgagaccaacaaatgacaccgtacatgagtcagccgagccatcccgcggcgagaacgcggcacaaacaccaaggatacccagccgccttttggcaatcctactgttcctcctggcgatgcttttgacattatag

SEQ ID NO: 316 - DNA, 718 bp, Artificial sequence
  A novel predicted alternative spliced variant
atggctgtgagaagggactccgtgtggaagtactgctggggtgttttgatggttttatgcagaactgcgatttccaaatcgatagttttagagcctatctattggaattcctcgaactccaactacatcaaatgggtctttggagggcctggataaccaggagggaggggtgtgccagacaagagccatgaagatcctcatgaaagttggacaagatgcaagttctgctggatcaaccaggaataaagatccaacaagacgtccagaactagaagctggtacaaatggaagaagttcgacaacaagtccctttgtaaaaccaaatccaggttctagcacagacggcaacagcgccggacattcggggaacaacatcctcggttccgaagtggccttatttgcagggattgcttcaggatgcatcatcttcatcgtcatcatcatcacgctggtggtcctcttgctgaagtaccggaggagacacaggaagcactcgccgcagcacacgaccacgctgtcgctcagcacactggccacacccaagcgcagcggcaacaacaacggctcagagcccagtgacattatcatcccgctaaggactgcggacagcgtcttctgccctcactacgagaaggtcagcggggactacgggcacccggtgtacatcgtccaggagatgcccccgcagagcccggcgaacatttactacaaggtctga

SEQ ID NO: 317 - DNA, 909 bp, Artificial sequence
  A novel predicted alternative spliced variant
atggctgtgagaagggactccgtgtggaagtactgctggggtgttttgatggttttatgcagaactgcgatttccaaatcgatagttttagagcctatctattggaattcctcgaactccaaatttctacctggacaaggactggtactatacccacagataggagacaaattggatattatttgccccaaagtggactctaaaactgttggccagtatgaatattataaagtttatatggttgataaagaccaagcagacagatgcactattaagaaggaaaatacccctctcctcaactgtgccaaaccagaccaagatatcaaattcaccatcaagtttcaagaattcagccctaacctctggggtctagaatttcagaagaacaaagattattacattatatatgcaagttctgctggatcaaccaggaataaagatccaacaagacgtccagaactagaagctggtacaaatggaagaagttcgacaacaagtccctttgtaaaaccaaatccaggttctagcacagacggcaacagcgccggacattcggggaacaacatcctcggttccgaagtggccttatttgcagggattgcttcaggatgcatcatcttcatcgtcatcatcatcacgctggtggtcctcttgctgaagtaccggaggagacacaggaagcactcgccgcagcacacgaccacgctgtcgctcagcacactggccacacccaagcgcagcggcaacaacaacggctcagagcccagtgacattatcatcccgctaaggactgcggacagcgtcttctgccctcactacgagaaggtcagcggggactacgggcacccggtgtacatcgtccaggagatgcccccgcagagcccggcgaacatttactacaaggtctga

SEQ ID NO: 318 - DNA, 888 bp, Artificial sequence
  A novel predicted alternative spliced variant
atggctgtgagaagggactccgtgtggaagtactgctggggtgttttgatggttttatgcagaactgcgatttccaaatcgatagttttagagcctatctattggaattcctcgaactccaaatttctacctggacaaggactggtactatacccacagataggagacaaattggatattatttgccccaaagtggactctaaaactgttggccagtatgaatattataaagtttatatggttgataaagaccaagcagacagatgcactattaagaaggaaaatacccctctcctcaactgtgccaaaccagaccaagatatcaaattcaccatcaagtttcaagaattcagccctaacctctggggtctagaatttcagaagaacaaagattattacattatatctacatcaaatgggtctttggagggcctggataaccaggagggaggggtgtgccagacaagagccatgaagatcctcatgaaagttggacaaggttctagcacagacggcaacagcgccggacattcggggaacaacatcctcggttccgaagtggccttatttgcagggattgcttcaggatgcatcatcttcatcgtcatcatcatcacgctggtggtcctcttgctgaagtaccggaggagacacaggaagcactcgccgcagcacacgaccacgctgtcgctcagcacactggccacacccaagcgcagcggcaacaacaacggctcagagcccagtgacattatcatcccgctaaggactgcggacagcgtcttctgccctcactacgagaaggtcagcggggactacgggcacccggtgtacatcgtccaggagatgcccccgcagagcccggcgaacatttactacaaggtctga

SEQ ID NO: 319 - DNA, 2893 bp, Artificial sequence
  A novel predicted alternative spliced variant
atggctgggattttctatttcgccctattttcgtgtctcttcgggatttgcgacgctgtcacaggttccagggtataccccgcgaatgaagtgggaggaagtgagtatcatggatgaaaaaaatacaccaatccgaacctaccaagtgtgcaatgtgatggaacccagccagaataactggctacgaactgattggatcacccgagaaggggctcagagggtgtatattgagattaaattcaccttgagggactgcaatagtcttccgggcgtcatggggacttgcaaggagacgtttaacctgtactactatgaatcagacaacgacaaagagcgtttcatcagagagaaccagtttgtcaaaattgacaccattgctgctgatgagagcttcacccaagtggacattggtgacagaatcatgaagctgaacaccgagatccgggatgtagggccattaagcaaaaaggggttttacctggcttttcaggatgtgggggcctgcatcgccctggtatcagtccgtgtgttctataaaaagtgtccactcacagtccgcaatctggcccagtttcctgacaccatcacaggggctgatacgtcttccctggtggaagttcgaggctcctgtgtcaacaactcagaagagaaagatgtgccaaaaatgtactgtggggcagatggtgaatggctggtacccattggcaactgcctatgcaacgctgggcatgaggagcggagcggagaatgccaagcttgcaaaattggatattacaaggctctctccacggatgccacctgtgccaagtgcccaccccacagctactctgtctgggaaggagccacctcgtgcacctgtgaccgaggctttttcagagctgacaacgatgctgcctctatgccctgcacccgtccaccatctgctcccctgaacttgatttcaaatgtcaacgagacatctgtgaacttggaatggagtagccctcagaatacaggtggccgccaggacatttcctataatgtggtatgcaagaaatgtggagctggtgaccccagcaagtgccgaccctgtggaagtggggtccactacaccccacagcagaatggcttgaagaccaccaaagtctccatcactgacctcctagctcataccaattacacctttgaaatctgggctgtgaatggagtgtccaaatataaccctaacccagaccaatcagtttctgtcactgtgaccaccaaccaagcagcaccatcatccattgctttggtccaggctaaagaagtcacaagatacagtgtggcactggcttggctggaaccagatcggcccaatggggtaatcctggaatatgaagtcaagtattatgagaaggatcagaatgagcgaagctatcgtatagttcggacagctgccaggaacacagatatcaaaggcctgaaccctctcacttcctatgttttccacgtgcgagccaggacagcagctggctatggagacttcagtgagcccttggaggttacaaccaacacagtgccttcccggatcattggagatggggctaactccacagtccttctggtctctgtctcgggcagtgtggtgctggtggtaattctcattgcagcttttgtcatcagccggagacggagtaaatacagtaaagccaaacaagaagcggatgaagagaaacatttgaatcaaggtgtaagaacatatgtggacccctttacgtacgaagatcccaaccaagcagtgcgagagtttgccaaagaaattgacgcatcctgcattaagattgaaaaagttataggagttggtgaatttggtgaggtatgcagtgggcgtctcaaagtgcctggcaagagagagatctgtgtggctatcaagactctgaaagctggttatacagacaaacagaggagagacttcctgagtgaggccagcatcatgggacagtttgaccatccgaacatcattcacttggaaggcgtggtcactaaatgtaaaccagtaatgatcataacagagtacatggagaatggctccttggatgcattcctcaggaaaaatgatggcagatttacagtcattcagctggtgggcatgcttcgtggcattgggtctgggatgaagtatttatctgatatgagctatgtgcatcgtgatctggccgcacggaacatcctggtgaacagcaacttggtctgcaaagtgtctgattttggcatgtcccgagtgcttgaggatgatccggaagcagcttacaccaccaggggtggcaagattcctatccggtggactgcgccagaagcaattgcctatcgtaaattcacatcagcaagtgatgtatggagctatggaatcgttatgtgggaagtgatgtcgtacggggagaggccctattgggatatgtccaatcaagatgtgattaaagccattgaggaaggctatcggttaccccctccaatggactgccccattgcgctccaccagctgatgctagactgctggcagaaggagaggagcgacaggcctaaatttgggcagattgtcaacatgttggacaaactcatccgcaaccccaacagcttgaagaggacagggacggagagctccagacctaacactgccttgttggatccaagctcccctgaattctctgctgtggtatcagtgggcgattggctccaggccattaaaatggaccggtataaggataacttcacagctgctggttataccacactagaggctgtggtgcacgtgaaccaggaggacctggcaagaattggtatcacagccatcacgcaccagaataagattttgagcagtgtccaggcaatgcgaacccaaatgcagcagatgcacggcagaatggttcccgtctga

SEQ ID NO: 320 - DNA, 2297 bp, Artificial sequence
  A novel predicted alternative spliced variant
atggctgggattttctatttcgccctattttcgtgtctcttcgggatttgcgacgctgtcacaggttccagggtataccccgcgaatgaagttaccttattggattccagatctgttcagggagaacttgggtggatagcaagccctctggaaggagggcttgcaaaattggatattacaaggctctctccacggatgccacctgtgccaagtgcccaccccacagctactctgtctgggaaggagccacctcgtgcacctgtgaccgaggctttttcagagctgacaacgatgctgcctctatgccctgcacccgtccaccatctgctcccctgaacttgatttcaaatgtcaacgagacatctgtgaacttggaatggagtagccctcagaatacaggtggccgccaggacatttcctataatgtggtatgcaagaaatgtggagctggtgaccccagcaagtgccgaccctgtggaagtggggtccactacaccccacagcagaatggcttgaagaccaccaaagtctccatcactgacctcctagctcataccaattacacctttgaaatctgggctgtgaatggagtgtccaaatataaccctaacccagaccaatcagtttctgtcactgtgaccaccaaccaagcagcaccatcatccattgctttggtccaggctaaagaagtcacaagatacagtgtggcactggcttggctggaaccagatcggcccaatggggtaatcctggaatatgaagtcaagtattatgagaaggatcagaatgagcgaagctatcgtatagttcggacagctgccaggaacacagatatcaaaggcctgaaccctctcacttcctatgttttccacgtgcgagccaggacagcagctggctatggagacttcagtgagcccttggaggttacaaccaacacagtgccttcccggatcattggagatggggctaactccacagtccttctggtctctgtctcgggcagtgtggtgctggtggtaattctcattgcagcttttgtcatcagccggagacggagtaaatacagtaaagccaaacaagaagcggatgaagagaaacatttgaatcaaggtgtaagaacatatgtggacccctttacgtacgaagatcccaaccaagcagtgcgagagtttgccaaagaaattgacgcatcctgcattaagattgaaaaagttataggagttggtgaatttggtgaggtatgcagtgggcgtctcaaagtgcctggcaagagagagatctgtgtggctatcaagactctgaaagctggttatacagacaaacagaggagagacttcctgagtgaggccagcatcatgggacagtttgaccatccgaacatcattcacttggaaggcgtggtcactaaatgtaaaccagtaatgatcataacagagtacatggagaatggctccttggatgcattcctcaggaaaaatgatggcagatttacagtcattcagctggtgggcatgcttcgtggcattgggtctgggatgaagtatttatctgatatgagctatgtgcatcgtgatctggccgcacggaacatcctggtgaacagcaacttggtctgcaaagtgtctgattttggcatgtcccgagtgcttgaggatgatccggaagcagcttacaccaccaggggtggcaagattcctatccggtggactgcgccagaagcaattgcctatcgtaaattcacatcagcaagtgatgtatggagctatggaatcgttatgtgggaagtgatgtcgtacggggagaggccctattgggatatgtccaatcaagatgtgattaaagccattgaggaaggctatcggttaccccctccaatggactgccccattgcgctccaccagctgatgctagactgctggcagaaggagaggagcgacaggcctaaatttgggcagattgtcaacatgttggacaaactcatccgcaaccccaacagcttgaagaggacagggacggagagctccagacctaacactgccttgttggatccaagctcccctgaattctctgctgtggtatcagtgggcgattggctccaggccattaaaatggaccggtataaggataacttcacagctgctggttataccacactagaggctgtggtgcacgtgaaccaggaggacctggcaagaattggtatcacagccatcacgcaccagaataagattttgagcagtgtccaggcaatgcgaacccaaatgcagcagatgcacggcagaatggttcccgtctga

SEQ ID NO: 321 - DNA, 2805 bp, Artificial sequence
  A novel predicted alternative spliced variant
atggctgggattttctatttcgccctattttcgtgtctcttcgggatttgcgacgctgtcacaggttccagggtataccccgcgaatgaagttaccttattggattccagatctgttcagggagaacttgggtggatagcaagccctctggaaggagggtgggaggaagtgagtatcatggatgaaaaaaatacaccaatccgaacctaccaagtgtgcaatgtgatggaacccagccagaataactggctacgaactgattggatcacccgagaaggggctcagagggtgtatattgagattaaattcaccttgagggactgcaatagtcttccgggcgtcatggggacttgcaaggagacgtttaacctgtactactatgaatcagacaacgacaaagagcgtttcatcagagagaaccagtttgtcaaaattgacaccattgctgctgatgagagcttcacccaagtggacattggtgacagaatcatgaagctgaacaccgagatccgggatgtagggccattaagcaaaaaggggttttacctggcttttcaggatgtgggggcctgcatcgccctggtatcagtccgtgtgttctataaaaagtgtccactcacagtccgcaatctggcccagtttcctgacaccatcacaggggctgatacgtcttccctggtggaagttcgaggctcctgtgtcaacaactcagaagagaaagatgtgccaaaaatgtactgtggggcagatggtgaatggctggtacccattggcaactgcctatgcaacgctgggcatgaggagcggagcggagaatgccaaggtccaccatctgctcccctgaacttgatttcaaatgtcaacgagacatctgtgaacttggaatggagtagccctcagaatacaggtggccgccaggacatttcctataatgtggtatgcaagaaatgtggagctggtgaccccagcaagtgccgaccctgtggaagtggggtccactacaccccacagcagaatggcttgaagaccaccaaagtctccatcactgacctcctagctcataccaattacacctttgaaatctgggctgtgaatggagtgtccaaatataaccctaacccagaccaatcagtttctgtcactgtgaccaccaaccaagcagcaccatcatccattgctttggtccaggctaaagaagtcacaagatacagtgtggcactggcttggctggaaccagatcggcccaatggggtaatcctggaatatgaagtcaagtattatgagaaggatcagaatgagcgaagctatcgtatagttcggacagctgccaggaacacagatatcaaaggcctgaaccctctcacttcctatgttttccacgtgcgagccaggacagcagctggctatggagacttcagtgagcccttggaggttacaaccaacacagtgccttcccggatcattggagatggggctaactccacagtccttctggtctctgtctcgggcagtgtggtgctggtggtaattctcattgcagcttttgtcatcagccggagacggagtaaatacagtaaagccaaacaagaagcggatgaagagaaacatttgaatcaaggtgtaagaacatatgtggacccctttacgtacgaagatcccaaccaagcagtgcgagagtttgccaaagaaattgacgcatcctgcattaagattgaaaaagttataggagttggtgaatttggtgaggtatgcagtgggcgtctcaaagtgcctggcaagagagagatctgtgtggctatcaagactctgaaagctggttatacagacaaacagaggagagacttcctgagtgaggccagcatcatgggacagtttgaccatccgaacatcattcacttggaaggcgtggtcactaaatgtaaaccagtaatgatcataacagagtacatggagaatggctccttggatgcattcctcaggaaaaatgatggcagatttacagtcattcagctggtgggcatgcttcgtggcattgggtctgggatgaagtatttatctgatatgagctatgtgcatcgtgatctggccgcacggaacatcctggtgaacagcaacttggtctgcaaagtgtctgattttggcatgtcccgagtgcttgaggatgatccggaagcagcttacaccaccaggggtggcaagattcctatccggtggactgcgccagaagcaattgcctatcgtaaattcacatcagcaagtgatgtatggagctatggaatcgttatgtgggaagtgatgtcgtacggggagaggccctattgggatatgtccaatcaagatgtgattaaagccattgaggaaggctatcggttaccccctccaatggactgccccattgcgctccaccagctgatgctagactgctggcagaaggagaggagcgacaggcctaaatttgggcagattgtcaacatgttggacaaactcatccgcaaccccaacagcttgaagaggacagggacggagagctccagacctaacactgccttgttggatccaagctcccctgaattctctgctgtggtatcagtgggcgattggctccaggccattaaaatggaccggtataaggataacttcacagctgctggttataccacactagaggctgtggtgcacgtgaaccaggaggacctggcaagaattggtatcacagccatcacgcaccagaataagattttgagcagtgtccaggcaatgcgaacccaaatgcagcagatgcacggcagaatggttcccgtctga

SEQ ID NO: 322 - DNA, 2899 bp, Artificial sequence
  A novel predicted alternative spliced variant
atggctgggattttctatttcgccctattttcgtgtctcttcgggatttgcgacgctgtcacaggttccagggtataccccgcgaatgaagttaccttattggattccagatctgttcagggagaacttgggtggatagcaagccctctggaaggagggtgggaggaagtgagtatcatggatgaaaaaaatacaccaatccgaacctaccaagtgtgcaatgtgatggaacccagccagaataactggctacgaactgattggatcacccgagaaggggctcagagggtgtatattgagattaaattcaccttgagggactgcaatagtcttccgggcgtcatggggacttgcaaggagacgtttaacctgtactactatgaatcagacaacgacaaagagcgtttcatcagagagaaccagtttgtcaaaattgacaccattgctgctgatgagagcttcacccaagtggacattggtgacagaatcatgaagctgaacaccgagatccgggatgtagggccattaagcaaaaaggggttttacctggcttttcaggatgtgggggcctgcatcgccctggtatcagtccgtgtgttctataaaaagtgtccactcacagtccgcaatctggcccagtttcctgacaccatcacaggggctgatacgtcttccctggtggaagttcgaggctcctgtgtcaacaactcagaagagaaagatgtgccaaaaatgtactgtggggcagatggtgaatggctggtacccattggcaactgcctatgcaacgctgggcatgaggagcggagcggagaatgccaagcttgcaaaattggatattacaaggctctctccacggatgccacctgtgccaagtgcccaccccacagctactctgtctgggaaggagccacctcgtgcacctgtgaccgaggctttttcagagctgacaacgatgctgcctctatgccctgcacccgtccaccatctgctcccctgaacttgatttcaaatgtcaacgagacatctgtgaacttggaatggagtagccctcagaatacaggtggccgccaggacatttcctataatgtggtatgcaagaaatgtggagctggtgaccccagcaagtgccgaccctgtggaagtggggtccactacaccccacagcagaatggcttgaagaccaccaaagtctccatcactgacctcctagctcataccaattacacctttgaaatctgggctgtgaatggagtgtccaaatataaccctaacccagaccaatcagtttctgtcactgtgaccaccaaccaagcagcaccatcatccattgctttggtccaggctaaagaagtcacaagatacagtgtggcactggcttggctggaaccagatcggcccaatggggtaatcctggaatatgaagtcaagtattatgagaaggatcagaatgagcgaagctatcgtatagttcggacagctgccaggaacacagatatcaaaggcctgaaccctctcacttcctatgttttccacgtgcgagccaggacagcagctggctatggagacttcagtgagcccttggaggttacaaccaacacagtgccttcccggatcattggagatggggctaactccacagtccttctggtctctgtctcgggcagtgtggtgctggtggtaattctcattgcagcttttgtcatcagccggagacggagtaaatacagtaaagccaaacaagaagcggatgaagagaaacatttgaatcaaggtgtaagaacatatgtggacccctttacgtacgaagatcccaaccaagcagtgcgagagtttgccaaagaaattgacgcatcctgcattaagattgaaaaagttataggagttggtgaatttggtgaggtatgcagtgggcgtctcaaagtgcctggcaagagagagatctgtgtggctatcaagactctgaaagctggttatacagacaaacagaggagagacttcctgagtgaggccagcatcatgggacagtttgaccatccgaacatcattcacttggaaggcgtggtcactaaataaaaatgatggcagatttacagtcattcagctggtgggcatgcttcgtggcattgggtctgggatgaagtatttatctgatatgagctatgtgcatcgtgatctggccgcacggaacatcctggtgaacagcaacttggtctgcaaagtgtctgattttggcatgtcccgagtgcttgaggatgatccggaagcagcttacaccaccaggggtggcaagattcctatccggtggactgcgccagaagcaattgcctatcgtaaattcacatcagcaagtgatgtatggagctatggaatcgttatgtgggaagtgatgtcgtacggggagaggccctattgggatatgtccaatcaagatgtgattaaagccattgaggaaggctatcggttaccccctccaatggactgccccattgcgctccaccagctgatgctagactgctggcagaaggagaggagcgacaggcctaaatttgggcagattgtcaacatgttggacaaactcatccgcaaccccaacagcttgaagaggacagggacggagagctccagacctaacactgccttgttggatccaagctcccctgaattctctgctgtggtatcagtgggcgattggctccaggccattaaaatggaccggtataaggataacttcacagctgctggttataccacactagaggctgtggtgcacgtgaaccaggaggacctggcaagaattggtatcacagccatcacgcaccagaataagattttgagcagtgtccaggcaatgcgaacccaaatgcagcagatgcacggcagaatggttcccgtctga

SEQ ID NO: 323 - DNA, 2958 bp, Artificial sequence
  A novel predicted alternative spliced variant
atgcggggctcggggccccggggtgcgggacaccggcggcccccaagcggcggcggcgacacccccatcaccccagcgtccctggccggctgctactctgcacctcgacgggctcccctctggacgtgccttctcctgtgcgccgcactccggaccctcctggccagccccagcaacgaagtgaatttattggattcacgcactgtcatgggggacctgggatggattgcttttccaaaaaatgggtgggaagagattggtgaagtggatgaaaattatgcccctatccacacataccaagtatgcaaagtgatggaacagaatcagaataactggcttttgaccagttggatctccaatgaaggtgcttccagaatcttcatagaactcaaatttaccctgcgggactgcaacagccttcctggaggactggggacctgtaaggaaacctttaatatgtattactttgagtcagatgatcagaatgggagaaacatcaaggaaaaccaatacatcaaaattgataccattgctgccgatgaaagctttacagaacttgatcttggtgaccgtgttatgaaactgaatacagaggtcagagatgtaggacctctaagcaaaaagggattttatcttgcttttcaagatgttggtgcttgcattgctctggtttctgtgcgtgtatactataaaaaatgcccttctgtggtacgacacttggctgtcttccctgacaccatcactggagctgattcttcccaattgctcgaagtgtcaggctcctgtgtcaaccattctgtgaccgatgaacctcccaaaatgcactgcagcgccgaaggggagtggctggtgcccatcgggaaatgcatgtgcaaggcaggatatgaagagaaaaatggcacctgtcaaggacccccctctgctcctcggaatgccatctcaaatgttaatgaaactagtgtctttctggaatggattccgcctgctgacactggtggaaggaaagacgtgtcatattatattgcatgcaagaagtgcaactcccatgcaggtgtgtgtgaggagtgtggcggtcatgtcaggtaccttccccggcaaagcggcctgaaaaacacctctgtcatgatggtggatctactcgctcacacaaactatacctttgagattgaggcagtgaatggagtgtccgacttgagcccaggagcccggcagtatgtgtctgtaaatgtaaccacaaatcaagcagctccatctccagtcaccaatgtgaaaaaagggaaaattgcaaaaaacagcatctctttgtcttggcaagaaccagatcgtcccaatggaatcatcctagagtatgaaatcaagcattttgaaaaggaccaagagaccagctacacgattatcaaatctaaagagacaactattactgcagagggcttgaaaccagcttcagtttatgtcttccaaattcgagcacgtacagcagcaggctatggtgtcttcagtcgaagatttgagtttgaaaccaccccagtgtttgcagcatccagcgatcaaagccagattcctgtaattgctgtgtctgtgacagtaggagtcattttgttggcagtggttatcggcgtcctcctcagtggaagttgctgcgaatgtggctgtgggagggcttcttccctgtgcgctgttgcccatccaatcctaatatggcggtgtggctacagcaaagcaaaacaagatccagaagaggaaaagatgcattttcataatgggcacattaaactgccaggagtaagaacttacattgatccacatacctatgaggatcccaatcaagctgtccacgaatttgccaaggagatagaagcatcatgtatcaccattgagagagttattggagcaggtgaatttggtgaagtttgtagtggacgtttgaaactaccaggaaaaagagaattacctgtggctatcaaaacccttaaagtaggctatactgaaaagcaacgcagagatttcctaggtgaagcaagtatcatgggacagtttgatcatcctaacatcatccatttagaaggtgtggtgaccaaaagtaaaccagtgatgatcgtgacagagtatatggagaatggctctttagatacatttttgaagaaaaacgatgggcagttcactgtgattcagcttgttggcatgctgagaggtatctctgcaggaatgaagtacctttctgacatgggctatgtgcatagagatcttgctgccagaaacatcttaatcaacagtaaccttgtgtgcaaagtgtctgactttggactttcccgggtactggaagatgatcccgaggcagcctacaccacaaggggaggaaaaattccaatcagatggactgccccagaagcaatagctttccgaaagtttacttctgccagtgatgtctggagttatggaatagtaatgtgggaagttgtgtcttatggagagagaccctactgggagatgaccaatcaagatgtgattaaagcggtagaggaaggctatcgtctgccaagccccatggattgtcctgctgctctctatcagttaatgctggattgctggcagaaagagcgaaatagcaggcccaagtttgatgaaatagtcaacatgttggacaagctgatacgtaacccaagtagtctgaagacgctggttaatgcatcctgcagagtatctaatttattggcagaacatagcccactaggatctggggcctacagatcagtaggtgaatggctagaggcaatcaagatgggccggtatacagagattttcatggaaaatggatacagttcaatggacgctgtggctcaggtgaccttggaggatttgagacggcttggagtgactcttgtcggtcaccagaagaagatcatgaacagccttcaagaaatgaaggtgcagctggtaaacggaatggtgccattgtaa

SEQ ID NO: 324 - DNA, 2778 bp, Artificial sequence
  A novel predicted alternative spliced variant
atgcggggctcggggccccggggtgcgggacaccggcggcccccaagcggcggcggcgacacccccatcaccccagcgtccctggccggctgctactctgcacctcgacgggctcccctctggacgtgccttctcctgtgcgccgcactccggaccctcctggccagccccagcaacgaagtgaatttattggattcacgcactgtcatgggggacctgggatggattgcttttccaaaaaatgggtgggaagagattggtgaagtggatgaaaattatgcccctatccacacataccaagtatgcaaagtgatggaacagaatcagaataactggcttttgaccagttggatctccaatgaaggtgcttccagaatcttcatagaactcaaatttaccctgcgggactgcaacagccttcctggaggactggggacctgtaaggaaacctttaatatgtattactttgagtcagatgatcagaatgggagaaacatcaaggaaaaccaatacatcaaaattgataccattgctgccgatgaaagctttacagaacttgatcttggtgaccgtgttatgaaactgaatacagaggtcagagatgtaggacctctaagcaaaaagggattttatcttgcttttcaagatgttggtgcttgcattgctctggtttctgtgcgtgtatactataaaaaatgcccttctgtggtacgacacttggctgtcttccctgacaccatcactggagctgattcttcccaattgctcgaagtgtcaggctcctgtgtcaaccattctgtgaccgatgaacctcccaaaatgcactgcagcgccgaaggggagtggctggtgcccatcgggaaatgcatgtgcaaggcaggatatgaagagaaaaatggcacctgtcaagtgtgcagacctgggttcttcaaagcctcacctcacatccagagctgcggcaaatgtccacctcacagttatacccatgaggaagcttcaacctcttgtgtctgtgaaaaggattatttcaggagagagtctgatccacccacaatggcatgcacaactccatctccagtcaccaatgtgaaaaaagggaaaattgcaaaaaacagcatctctttgtcttggcaagaaccagatcgtcccaatggaatcatcctagagtatgaaatcaagcattttgaaaaggaccaagagaccagctacacgattatcaaatctaaagagacaactattactgcagagggcttgaaaccagcttcagtttatgtcttccaaattcgagcacgtacagcagcaggctatggtgtcttcagtcgaagatttgagtttgaaaccaccccagtgtttgcagcatccagcgatcaaagccagattcctgtaattgctgtgtctgtgacagtaggagtcattttgttggcagtggttatcggcgtcctcctcagtggaagttgctgcgaatgtggctgtgggagggcttcttccctgtgcgctgttgcccatccaatcctaatatggcggtgtggctacagcaaagcaaaacaagatccagaagaggaaaagatgcattttcataatgggcacattaaactgccaggagtaagaacttacattgatccacatacctatgaggatcccaatcaagctgtccacgaatttgccaaggagatagaagcatcatgtatcaccattgagagagttattggagcaggtgaatttggtgaagtttgtagtggacgtttgaaactaccaggaaaaagagaattacctgtggctatcaaaacccttaaagtaggctatactgaaaagcaacgcagagatttcctaggtgaagcaagtatcatgggacagtttgatcatcctaacatcatccatttagaaggtgtggtgaccaaaagtaaaccagtgatgatcgtgacagagtatatggagaatggctctttagatacatttttgaagaaaaacgatgggcagttcactgtgattcagcttgttggcatgctgagaggtatctctgcaggaatgaagtacctttctgacatgggctatgtgcatagagatcttgctgccagaaacatcttaatcaacagtaaccttgtgtgcaaagtgtctgactttggactttcccgggtactggaagatgatcccgaggcagcctacaccacaaggggaggaaaaattccaatcagatggactgccccagaagcaatagctttccgaaagtttacttctgccagtgatgtctggagttatggaatagtaatgtgggaagttgtgtcttatggagagagaccctactgggagatgaccaatcaagatgtgattaaagcggtagaggaaggctatcgtctgccaagccccatggattgtcctgctgctctctatcagttaatgctggattgctggcagaaagagcgaaatagcaggcccaagtttgatgaaatagtcaacatgttggacaagctgatacgtaacccaagtagtctgaagacgctggttaatgcatcctgcagagtatctaatttattggcagaacatagcccactaggatctggggcctacagatcagtaggtgaatggctagaggcaatcaagatgggccggtatacagagattttcatggaaaatggatacagttcaatggacgctgtggctcaggtgaccttggaggatttgagacggcttggagtgactcttgtcggtcaccagaagaagatcatgaacagccttcaagaaatgaaggtgcagctggtaaacggaatggtgccattgtaa

SEQ ID NO: 325 - DNA, 3011 bp, Artificial sequence
  A novel predicted alternative spliced variant
atgcggggctcggggccccggggtgcgggacaccggcggcccccaagcggcggcggcgacacccccatcaccccagcgtccctggccggctgctactctgcacctcgacgggctcccctctggacgtgccttctcctgtgcgccgcactccggaccctcctggccagccccagcaacgaagtgaatttattggattcacgcactgtcatgggggacctgggatggattgcttttccaaaaaatgggtgggaagagattggtgaagtggatgaaaattatgcccctatccacacataccaagtatgcaaagtgatggaacagaatcagaataactggcttttgaccagttggatctccaatgaaggtgcttccagaatcttcatagaactcaaatttaccctgcgggactgcaacagccttcctggaggactggggacctgtaaggaaacctttaatatgtattactttgagtcagatgatcagaatgggagaaacatcaaggaaaaccaatacatcaaaattgataccattgctgccgatgaaagctttacagaacttgatcttggtgaccgtgttatgaaactgaatacagaggtcagagatgtaggacctctaagcaaaaagggattttatcttgcttttcaagatgttggtgcttgcattgctctggtttctgtgcgtgtatactataaaaaatgcccttctgtggtacgacacttggctgtcttccctgacaccatcactggagctgattcttcccaattgctcgaagtgtcaggctcctgtgtcaaccattctgtgaccgatgaacctcccaaaatgcactgcagcgccgaaggggagtggctggtgcccatcgggaaatgcatgtgcaaggcaggatatgaagagaaaaatggcacctgtcaagtgtgcagacctgggttcttcaaagcctcacctcacatccagagctgcggcaaatgtccacctcacagttatacccatgaggaagcttcaacctcttgtgtctgtgaaaaggattatttcaggagagagtctgatccacccacaatggcatgcacaagacccccctctgctcctcggaatgccatctcaaatgttaatgaaactagtgtctttctggaatggattccgcctgctgacactggtggaaggaaagacgtgtcatattatattgcatgcaagaagtgcaactcccatgcaggtgtgtgtgaggagtgtggcggtcatgtcaggtaccttccccggcaaagcggcctgaaaaacacctctgtcatgatggtggatctactcgctcacacaaactatacctttgagattgaggcagtgaatggagtgtccgacttgagcccaggagcccggcagtatgtgtctgtaaatgtaaccacaaatcaagcagctccatctccagtcaccaatgtgaaaaaagggaaaattgcaaaaaacagcatctctttgtcttggcaagaaccagatcgtcccaatggaatcatcctagagtatgaaatcaagcattttgaaaaggaccaagagaccagctacacgattatcaaatctaaagagacaactattactgcagagggcttgaaaccagcttcagtttatgtcttccaaattcgagcacgtacagcagcaggctatggtgtcttcagtcgaagatttgagtttgaaaccaccccagtgtttgctgcgaatgtggctgtgggagggcttcttccctgtgcgctgttgcccatccaatcctaatatggcggtgtggctacagcaaagcaaaacaagatccagaagaggaaaagatgcattttcataatgggcacattaaactgccaggagtaagaacttacattgatccacatacctatgaggatcccaatcaagctgtccacgaatttgccaaggagatagaagcatcatgtatcaccattgagagagttattggagcaggtgaatttggtgaagtttgtagtggacgtttgaaactaccaggaaaaagagaattacctgtggctatcaaaacccttaaagtaggctatactgaaaagcaacgcagagatttcctaggtgaagcaagtatcatgggacagtttgatcatcctaacatcatccatttagaaggtgtggtgaccaaaagtaaaccagtgatgatcgtgacagagtatatggagaatggctctttagatacatttttgaagaaaaacgatgggcagttcactgtgattcagcttgttggcatgctgagaggtatctctgcaggaatgaagtacctttctgacatgggctatgtgcatagagatcttgctgccagaaacatcttaatcaacagtaaccttgtgtgcaaagtgtctgactttggactttcccgggtactggaagatgatcccgaggcagcctacaccacaaggggaggaaaaattccaatcagatggactgccccagaagcaatagctttccgaaagtttacttctgccagtgatgtctggagttatggaatagtaatgtgggaagttgtgtcttatggagagagaccctactgggagatgaccaatcaagatgtgattaaagcggtagaggaaggctatcgtctgccaagccccatggattgtcctgctgctctctatcagttaatgctggattgctggcagaaagagcgaaatagcaggcccaagtttgatgaaatagtcaacatgttggacaagctgatacgtaacccaagtagtctgaagacgctggttaatgcatcctgcagagtatctaatttattggcagaacatagcccactaggatctggggcctacagatcagtaggtgaatggctagaggcaatcaagatgggccggtatacagagattttcatggaaaatggatacagttcaatggacgctgtggctcaggtgaccttggaggatttgagacggcttggagtgactcttgtcggtcaccagaagaagatcatgaacagccttcaagaaatgaaggtgcagctggtaaacggaatggtgccattgtaa

SEQ ID NO: 326 - DNA, 3046 bp, Artificial sequence
  A novel predicted alternative spliced variant
atgcggggctcggggccccggggtgcgggacaccggcggcccccaagcggcggcggcgacacccccatcaccccagcgtccctggccggctgctactctgcacctcgacgggctcccctctggacgtgccttctcctgtgcgccgcactccggaccctcctggccagccccagcaacgaagtgaatttattggattcacgcactgtcatgggggacctgggatggattgcttttccaaaaaatgggtgggaagagattggtgaagtggatgaaaattatgcccctatccacacataccaagtatgcaaagtgatggaacagaatcagaataactggcttttgaccagttggatctccaatgaaggtgcttccagaatcttcatagaactcaaatttaccctgcgggactgcaacagccttcctggaggactggggacctgtaaggaaacctttaatatgtattactttgagtcagatgatcagaatgggagaaacatcaaggaaaaccaatacatcaaaattgataccattgctgccgatgaaagctttacagaacttgatcttggtgaccgtgttatgaaactgaatacagaggtcagagatgtaggacctctaagcaaaaagggattttatcttgcttttcaagatgttggtgcttgcattgctctggtttctgtgcgtgtatactataaaaaatgcccttctgtggtacgacacttggctgtcttccctgacaccatcactggagctgattcttcccaattgctcgaagtgtcaggctcctgtgtcaaccattctgtgaccgatgaacctcccaaaatgcactgcagcgccgaaggggagtggctggtgcccatcgggaaatgcatgtgcaaggcaggatatgaagagaaaaatggcacctgtcaagtgtgcagacctgggttcttcaaagcctcacctcacatccagagctgcggcaaatgtccacctcacagttatacccatgaggaagcttcaacctcttgtgtctgtgaaaaggattatttcaggagagagtctgatccacccacaatggcatgcacaagacccccctctgctcctcggaatgccatctcaaatgttaatgaaactagtgtctttctggaatggattccgcctgctgacactggtggaaggaaagacgtgtcatattatattgcatgcaagaagtgcaactcccatgcaggtgtgtgtgaggagtgtggcggtcatgtcaggtaccttccccggcaaagcggcctgaaaaacacctctgtcatgatggtggatctactcgctcacacaaactatacctttgagattgaggcagtgaatggagtgtccgacttgagcccaggagcccggcagtatgtgtctgtaaatgtaaccacaaatcaagcagctccatctccagtcaccaatgtgaaaaaagggaaaattgcaaaaaacagcatctctttgtcttggcaagaaccagatcgtcccaatggaatcatcctagagtatgaaatcaagcattttgaaaaggaccaagagaccagctacacgattatcaaatctaaagagacaactattactgcagagggcttgaaaccagcttcagtttatgtcttccaaattcgagcacgtacagcagcaggctatggtgtcttcagtcgaagatttgagtttgaaaccaccccagtgtttgcagcatccagcgatcaaagccagattcctgtaattgctgtgtctgtgacagtaggagtcattttgttggcagtggttatcggcgtcctcctcagtggaagttgctgcgaatgtggctgtgggagggcttcttccctgtgcgctgttgcccatccaatcctaatatgttaaactgccaggagtaagaacttacattgatccacatacctatgaggatcccaatcaagctgtccacgaatttgccaaggagatagaagcatcatgtatcaccattgagagagttattggagcaggtgaatttggtgaagtttgtagtggacgtttgaaactaccaggaaaaagagaattacctgtggctatcaaaacccttaaagtaggctatactgaaaagcaacgcagagatttcctaggtgaagcaagtatcatgggacagtttgatcatcctaacatcatccatttagaaggtgtggtgaccaaaagtaaaccagtgatgatcgtgacagagtatatggagaatggctctttagatacatttttgaagaaaaacgatgggcagttcactgtgattcagcttgttggcatgctgagaggtatctctgcaggaatgaagtacctttctgacatgggctatgtgcatagagatcttgctgccagaaacatcttaatcaacagtaaccttgtgtgcaaagtgtctgactttggactttcccgggtactggaagatgatcccgaggcagcctacaccacaaggggaggaaaaattccaatcagatggactgccccagaagcaatagctttccgaaagtttacttctgccagtgatgtctggagttatggaatagtaatgtgggaagttgtgtcttatggagagagaccctactgggagatgaccaatcaagatgtgattaaagcggtagaggaaggctatcgtctgccaagccccatggattgtcctgctgctctctatcagttaatgctggattgctggcagaaagagcgaaatagcaggcccaagtttgatgaaatagtcaacatgttggacaagctgatacgtaacccaagtagtctgaagacgctggttaatgcatcctgcagagtatctaatttattggcagaacatagcccactaggatctggggcctacagatcagtaggtgaatggctagaggcaatcaagatgggccggtatacagagattttcatggaaaatggatacagttcaatggacgctgtggctcaggtgaccttggaggatttgagacggcttggagtgactcttgtcggtcaccagaagaagatcatgaacagccttcaagaaatgaaggtgcagctggtaaacggaatggtgccattgtaa

SEQ ID NO: 327 - DNA, 2904 bp, Artificial sequence
  A novel predicted alternative spliced variant
atgcggggctcggggccccggggtgcgggacaccggcggcccccaagcggcggcggcgacacccccatcaccccagcgtccctggccggctgctactctgcacctcgacgggctcccctctggacgtgccttctcctgtgcgccgcactccggaccctcctggccagccccagcaacgaagtgaatttattggattcacgcactgtcatgggggacctgggatggattgcttttccaaaaaatgggtgggaagagattggtgaagtggatgaaaattatgcccctatccacacataccaagtatgcaaagtgatggaacagaatcagaataactggcttttgaccagttggatctccaatgaaggtgcttccagaatcttcatagaactcaaatttaccctgcgggactgcaacagccttcctggaggactggggacctgtaaggaaacctttaatatgtattactttgagtcagatgatcagaatgggagaaacatcaaggaaaaccaatacatcaaaattgataccattgctgccgatgaaagctttacagaacttgatcttggtgaccgtgttatgaaactgaatacagaggtcagagatgtaggacctctaagcaaaaagggattttatcttgcttttcaagatgttggtgcttgcattgctctggtttctgtgcgtgtatactataaaaaatgcccttctgtggtacgacacttggctgtcttccctgacaccatcactggagctgattcttcccaattgctcgaagtgtcaggctcctgtgtcaaccattctgtgaccgatgaacctcccaaaatgcactgcagcgccgaaggggagtggctggtgcccatcgggaaatgcatgtgcaaggcaggatatgaagagaaaaatggcacctgtcaagtgtgcagacctgggttcttcaaagcctcacctcacatccagagctgcggcaaatgtccacctcacagttatacccatgaggaagcttcaacctcttgtgtctgtgaaaaggattatttcaggagagagtctgatccacccacaatggcatgcacaagacccccctctgctcctcggaatgccatctcaaatgttaatgaaactagtgtctttctggaatggattccgcctgctgacactggtggaaggaaagacgtgtcatattatattgcatgcaagaagtgcaactcccatgcaggtgtgtgtgaggagtgtggcggtcatgtcaggtaccttccccggcaaagcggcctgaaaaacacctctgtcatgatggtggatctactcgctcacacaaactatacctttgagattgaggcagtgaatggagtgtccgacttgagcccaggagcccggcagtatgtgtctgtaaatgtaaccacaaatcaagcagctccatctccagtcaccaatgtgaaaaaagggaaaattgcaaaaaacagcatctctttgtcttggcaagaaccagatcgtcccaatggaatcatcctagagtatgaaatcaagcattttgaaaaggaccaagagaccagctacacgattatcaaatctaaagagacaactattactgcagagggcttgaaaccagcttcagtttatgtcttccaaattcgagcacgtacagcagcaggctatggtgtcttcagtcgaagatttgagtttgaaaccaccccagtgtttgcagcatccagcgatcaaagccagattcctgtaattgctgtgtctgtgacagtaggagtcattttgttggcagtggttatcggcgtcctcctcagtggaagttgctgcgaatgtggctgtgggagggcttcttccctgtgcgctgttgcccatccaatcctaatatggcggtgtggctacagcaaagcaaaacaagatccagaagaggaaaagatgcattttcataatgggcacattaaactgccaggagtaagaacttacattgatccacatacctatgaggatcccaatcaagctgtccacgaatttgccaaggagatagaagcatcatgtatcaccattgagagagttattggagcaggtgaatttggtgaagtttgtagtggacgtttgaaactaccaggaaaaagagaattacctgtggctatcaaaacccttaaagtaggctatactgaaaagcaacgcagagatttcctaggtgaagcaagtatcatgggacagtttgatcatcctaacatcatccatttagaaggtgtggtgaccaaaagtaaaccagtgatgatcgtgacagagtatatggagaatggctctttagatacatttttgaagggaggaaaaattccaatcagatggactgccccagaagcaatagctttccgaaagtttacttctgccagtgatgtctggagttatggaatagtaatgtgggaagttgtgtcttatggagagagaccctactgggagatgaccaatcaagatgtgattaaagcggtagaggaaggctatcgtctgccaagccccatggattgtcctgctgctctctatcagttaatgctggattgctggcagaaagagcgaaatagcaggcccaagtttgatgaaatagtcaacatgttggacaagctgatacgtaacccaagtagtctgaagacgctggttaatgcatcctgcagagtatctaatttattggcagaacatagcccactaggatctggggcctacagatcagtaggtgaatggctagaggcaatcaagatgggccggtatacagagattttcatggaaaatggatacagttcaatggacgctgtggctcaggtgaccttggaggatttgagacggcttggagtgactcttgtcggtcaccagaagaagatcatgaacagccttcaagaaatgaaggtgcagctggtaaacggaatggtgccattgtaa

SEQ ID NO: 328 - DNA, 2920 bp, Artificial sequence
  A novel predicted alternative spliced variant
atgcggggctcggggccccggggtgcgggacaccggcggcccccaagcggcggcggcgacacccccatcaccccagcgtccctggccggctgctactctgcacctcgacgggctcccctctggacgtgccttctcctgtgcgccgcactccggaccctcctggccagccccagcaacgaagtgaatttattggattcacgcactgtcatgggggacctgggatggattgcttttccaaaaaatgggtgggaagagattggtgaagtggatgaaaattatgcccctatccacacataccaagtatgcaaagtgatggaacagaatcagaataactggcttttgaccagttggatctccaatgaaggtgcttccagaatcttcatagaactcaaatttaccctgcgggactgcaacagccttcctggaggactggggacctgtaaggaaacctttaatatgtattactttgagtcagatgatcagaatgggagaaacatcaaggaaaaccaatacatcaaaattgataccattgctgccgatgaaagctttacagaacttgatcttggtgaccgtgttatgaaactgaatacagaggtcagagatgtaggacctctaagcaaaaagggattttatcttgcttttcaagatgttggtgcttgcattgctctggtttctgtgcgtgtatactataaaaaatgcccttctgtggtacgacacttggctgtcttccctgacaccatcactggagctgattcttcccaattgctcgaagtgtcaggctcctgtgtcaaccattctgtgaccgatgaacctcccaaaatgcactgcagcgccgaaggggagtggctggtgcccatcgggaaatgcatgtgcaaggcaggatatgaagagaaaaatggcacctgtcaagtgtgcagacctgggttcttcaaagcctcacctcacatccagagctgcggcaaatgtccacctcacagttatacccatgaggaagcttcaacctcttgtgtctgtgaaaaggattatttcaggagagagtctgatccacccacaatggcatgcacaagacccccctctgctcctcggaatgccatctcaaatgttaatgaaactagtgtctttctggaatggattccgcctgctgacactggtggaaggaaagacgtgtcatattatattgcatgcaagaagtgcaactcccatgcaggtgtgtgtgaggagtgtggcggtcatgtcaggtaccttccccggcaaagcggcctgaaaaacacctctgtcatgatggtggatctactcgctcacacaaactatacctttgagattgaggcagtgaatggagtgtccgacttgagcccaggagcccggcagtatgtgtctgtaaatgtaaccacaaatcaagcagctccatctccagtcaccaatgtgaaaaaagggaaaattgcaaaaaacagcatctctttgtcttggcaagaaccagatcgtcccaatggaatcatcctagagtatgaaatcaagcattttgaaaaggaccaagagaccagctacacgattatcaaatctaaagagacaactattactgcagagggcttgaaaccagcttcagtttatgtcttccaaattcgagcacgtacagcagcaggctatggtgtcttcagtcgaagatttgagtttgaaaccaccccagtgtttgcagcatccagcgatcaaagccagattcctgtaattgctgtgtctgtgacagtaggagtcattttgttggcagtggttatcggcgtcctcctcagtggaagttgctgcgaatgtggctgtgggagggcttcttccctgtgcgctgttgcccatccaatcctaatatggcggtgtggctacagcaaagcaaaacaagatccagaagaggaaaagatgcattttcataatgggcacattaaactgccaggagtaagaacttacattgatccacatacctatgaggatcccaatcaagctgtccacgaatttgccaaggagatagaagcatcatgtatcaccattgagagagttattggagcaggtgaatttggtgaagtttgtagtggacgtttgaaactaccaggaaaaagagaattacctgtggctatcaaaacccttaaagtaggctatactgaaaagcaacgcagagatttcctaggtgaagcaagtatcatgggacagtttgatcatcctaacatcatccatttagaaggtgtggtgaccaaaagtaaaccagtgatgatcgtgacagagtatatggagaatggctctttagatacatttttgaagaaaaacgatgggcagttcactgtgattcagcttgttggcatgctgagaggtatctctgcaggaatgaagtacctttctgacatgggctatgtgcatagagatcttgctgccagaaacatcttaatcaacagtaaccttgtgtgcaaagtgtctgactttggactttcccgggtactggaagatgatcccgaggcagcctacaccacaaggggaggaaaaattccaatcagatggactgccccagaagcaatagctttccgaaagtttacttctgccagtgatgtctggagttatggaatagtaatgtgggaagttgtgtcttatggagagagaccctactgggagatgaccaatcaagatagtatctaatttattggcagaacatagcccactaggatctggggcctacagatcagtaggtgaatggctagaggcaatcaagatgggccggtatacagagattttcatggaaaatggatacagttcaatggacgctgtggctcaggtgaccttggaggatttgagacggcttggagtgactcttgtcggtcaccagaagaagatcatgaacagccttcaagaaatgaaggtgcagctggtaaacggaatggtgccattgtaa

SEQ ID NO: 329 - DNA, 2958 bp, Artificial sequence
  A novel predicted alternative spliced variant
atgcggggctcggggccccggggtgcgggacaccggcggcccccaagcggcggcggcgacacccccatcaccccagcgtccctggccggctgctactctgcacctcgacgggctcccctctggacgtgccttctcctgtgcgccgcactccggaccctcctggccagccccagcaacgaagtgaatttattggattcacgcactgtcatgggggacctgggatggattgcttttccaaaaaatgggtgggaagagattggtgaagtggatgaaaattatgcccctatccacacataccaagtatgcaaagtgatggaacagaatcagaataactggcttttgaccagttggatctccaatgaaggtgcttccagaatcttcatagaactcaaatttaccctgcgggactgcaacagccttcctggaggactggggacctgtaaggaaacctttaatatgtattactttgagtcagatgatcagaatgggagaaacatcaaggaaaaccaatacatcaaaattgataccattgctgccgatgaaagctttacagaacttgatcttggtgaccgtgttatgaaactgaatacagaggtcagagatgtaggacctctaagcaaaaagggattttatcttgcttttcaagatgttggtgcttgcattgctctggtttctgtgcgtgtatactataaaaaatgcccttctgtggtacgacacttggctgtcttccctgacaccatcactggagctgattcttcccaattgctcgaagtgtcaggctcctgtgtcaaccattctgtgaccgatgaacctcccaaaatgcactgcagcgccgaaggggagtggctggtgcccatcgggaaatgcatgtgcaaggcaggatatgaagagaaaaatggcacctgtcaagtgtgcagacctgggttcttcaaagcctcacctcacatccagagctgcggcaaatgtccacctcacagttatacccatgaggaagcttcaacctcttgtgtctgtgaaaaggattatttcaggagagagtctgatccacccacaatggcatgcacaagacccccctctgctcctcggaatgccatctcaaatgttaatgaaactagtgtctttctggaatggattccgcctgctgacactggtggaaggaaagacgtgtcatattatattgcatgcaagaagtgcaactcccatgcaggtgtgtgtgaggagtgtggcggtcatgtcaggtaccttccccggcaaagcggcctgaaaaacacctctgtcatgatggtggatctactcgctcacacaaactatacctttgagattgaggcagtgaatggagtgtccgacttgagcccaggagcccggcagtatgtgtctgtaaatgtaaccacaaatcaagcagctccatctccagtcaccaatgtgaaaaaagggaaaattgcaaaaaacagcatctctttgtcttggcaagaaccagatcgtcccaatggaatcatcctagagtatgaaatcaagcattttgaaaaggaccaagagaccagctacacgattatcaaatctaaagagacaactattactgcagagggcttgaaaccagcttcagtttatgtcttccaaattcgagcacgtacagcagcaggctatggtgtcttcagtcgaagatttgagtttgaaaccaccccagtgtttgcagcatccagcgatcaaagccagattcctgtaattgctgtgtctgtgacagtaggagtcattttgttggcagtggttatcggcgtcctcctcagtggaagttgctgcgaatgtggctgtgggagggcttcttccctgtgcgctgttgcccatccaatcctaatatggcggtgtggctacagcaaagcaaaacaagatccagaagaggaaaagatgcattttcataatgggcacattaaactgccaggagtaagaacttacattgatccacatacctatgaggatcccaatcaagctgtccacgaatttgccaaggagatagaagcatcatgtatcaccattgagagagttattggagcaggtgaatttggtgaagtttgtagtggacgtttgaaactaccaggaaaaagagaattacctgtggctatcaaaacccttaaagtaggctatactgaaaagcaacgcagagatttcctaggtgaagcaagtatcatgggacagtttgatcatcctaacatcatccatttagaaggtgtggtgaccaaaagtaaaccagtgatgatcgtgacagagtatatggagaatggctctttagatacatttttgaagaaaaacgatgggcagttcactgtgattcagcttgttggcatgctgagaggtatctctgcaggaatgaagtacctttctgacatgggctatgtgcatagagatcttgctgccagaaacatcttaatcaacagtaaccttgtgtgcaaagtgtctgactttggactttcccgggtactggaagatgatcccgaggcagcctacaccacaaggggaggaaaaattccaatcagatggactgccccagaagcaatagctttccgaaagtttacttctgccagtgatgtctggagttatggaatagtaatgtgggaagttgtgtcttatggagagagaccctactgggagatgaccaatcaagatgtgattaaagcggtagaggaaggctatcgtctgccaagccccatggattgtcctgctgctctctatcagttaatgctggattgctggcagaaagagcgaaatagcaggcccaagtttgatgaaatagtcaacatgttggacaagctgatacgtaacccaagtagtctgaagacgctggttaatgcatcctgcagggatttgagacggcttggagtgactcttgtcggtcaccagaagaagatcatgaacagccttcaagaaatgaaggtgcagctggtaaacggaatggtgccattgtaa

SEQ ID NO: 330 - DNA, 2871 bp, Artificial sequence
  A novel predicted alternative spliced variant
atggtttttcaaactcggtacccttcatggattattttatgctacatctggctgctccgctttgcacacacaggggaggcgcaggctgcgaaggaagtactactgctggattctaaagcacaacaaacagagttggagtggatttcctctccacccaatgggtgggaagaaattagtggtttggatgagaactataccccgatacgaacataccaggtgtgccaagtcatggagcccaaccaaaacaactggctgcggactaactggatttccaaaggcaatgcacaaaggatttttgtagaattgaaattcaccctgagggattgtaacagtcttcctggagtactgggaacttgcaaggaaacatttaatttgtactattatgaaacagactatgacactggcaggaatataagagaaaacctctatgtaaaaatagacaccattgctgcagatgaaagttttacccaaggtgaccttggtgaaagaaagatgaagcttaacactgaggtgagagagattggacctttgtccaaaaagggattctatcttgcctttcaggatgtaggggcttgcatagctttggtttctgtcaaagtgtactacaagaagtgctggtccattattgagaacttagctatctttccagatacagtgactggttcagaattttcctctttagtcgaggttcgagggacatgtgtcagcagtgcagaggaagaagcggaaaacgcccccaggatgcactgcagtgcagaaggagaatggttagtgcccattggaaaatgtatctgcaaagcaggctaccagcaaaaaggagacacttgtgaaccctgtggccgtgggttctacaagtcttcctctcaagatcttcagtgctctcgttgtccaactcacagtttttctgataaagaaggctcctccagatgtgaatgtgaagatgggtattacagggctccatctgacccaccatacgttgcatgcacaaggcctccatctgcaccacagaacctcattttcaacatcaaccaaaccacagtaagtttggaatggagtcctcctgcagacaatgggggaagaaacgatgtgacctacagaatattgtgtaagcggtgcagttgggagcagggcgaatgtgttccctgtgggagtaacattggatacatgccccagcagactggattagaggataactatgtcactgtcatggacctgctagcccacgctaattatacttttgaagttgaagctgtaaatggagtttctgacttaagccgatcccagaggctctttgctgctgtcagtatcaccactggtcaagcagctccctcgcaagtgagcggagtaatgaaggagagagtactgcagcggagtgtcgagctttcctggcaggaaccagagcatcccaatggagtcatcacagaatatgaaatcaagtattacgagaaagatcaaagggaacggacctactcaacagtaaaaaccaagtctacttcagcctccattaataatctgaaaccaggaacagtgtatgttttccagattcgggcttttactgctgctggttatggaaattacagtcccagacttgatgttgctacactagaggaagctacaggtaaaatgtttgaagctacagctgtctccagtgaacagaatcctgttattatcattgctgtggttgctgtagctgggaccatcattttggtgttcatggtctttggcttcatcattgggagaaggcactgtggttatagcaaagctgaccaagaaggcgatgaagagctttactttcattgagaattcggtgaagtctgcagtggccgtttgaaacttccagggaaaagagatgttgcagtagccataaaaaccctgaaagttggttacacagaaaaacaaaggagagactttttgtgtgaagcaagcatcatggggcagtttgaccacccaaatgttgtccatttggaaggggttgttacaagagggaaaccagtcatgatagtaatagagttcatggaaaatggagccctagatgcatttctcaggaaacatgatgggcaatttacagtcattcagttagtaggaatgctgagaggaattgctgctggaatgagatatttggctgatatgggatatgttcacagggaccttgcagctcgcaatattcttgtcaacagcaatctcgtttgtaaagtgtcagattttggcctgtcccgagttatagaggatgatccagaagctgtctatacaactactggtggaaaaattccagtaaggtggacagcacccgaagccatccagtaccggaaattcacatcagccagtgatgtatggagctatggaatagtcatgtgggaagttatgtcttatggagaaagaccttattgggacatgtcaaatcaagatgttataaaagcaatagaagaaggttatcgtttaccagcacccatggactgcccagctggccttcaccagctaatgttggattgttggcaaaaggagcgtgctgaaaggccaaaatttgaacagatagttggaattctagacaaaatgattcgaaacccaaatagtctgaaaactcccctgggaacttgtagtaggccaataagccctcttctggatcaaaacactcctgatttcactaccttttgttcagttggagaatggctacaagctattaagatggaaagatataaagataatttcacggcagctggctacaattcccttgaatcagtagccaggatgactattgaggatgtgatgagtttagggatcacactggttggtcatcaaaagaaaatcatgagcagcattcagactatgagagcacaaatgctacatttacatggaactggcattcaagtgtga

SEQ ID NO: 331 - DNA, 2803 bp, Artificial sequence
  A novel predicted alternative spliced variant
atggtttttcaaactcggtacccttcatggattattttatgctacatctggctgctccgctttgcacacacaggggaggcgcaggctgcgaaggaagtactactgctggattctaaagcacaacaaacagagttggagtggatttcctctccacccaatgggtgggaagaaattagtggtttggatgagaactataccccgatacgaacataccaggtgtgccaagtcatggagcccaaccaaaacaactggctgcggactaactggatttccaaaggcaatgcacaaaggatttttgtagaattgaaattcaccctgagggattgtaacagtcttcctggagtactgggaacttgcaaggaaacatttaatttgtactattatgaaacagactatgacactggcaggaatataagagaaaacctctatgtaaaaatagacaccattgctgcagatgaaagttttacccaaggtgaccttggtgaaagaaagatgaagcttaacactgaggtgagagagattggacctttgtccaaaaagggattctatcttgcctttcaggatgtaggggcttgcatagctttggtttctgtcaaagtgtactacaagaagtgctggtccattattgagaacttagctatctttccagatacagtgactggttcagaattttcctctttagtcgaggttcgagggacatgtgtcagcagtgcagaggaagaagcggaaaacgcccccaggatgcactgcagtgcagaaggagaatggttagtgcccattggaaaatgtatctgcaaagcaggctaccagcaaaaaggagacacttgtgaaccctgtggccgtgggttctacaagtcttcctctcaagatcttcagtgctctcgttgtccaactcacagtttttctgataaagaaggctcctccagatgtgaatgtgaagatgggtattacagggctccatctgacccaccatacgttgcatgcacaaggcctccatctgcaccacagaacctcattttcaacatcaaccaaaccacagtaagtttggaatggagtcctcctgcagacaatgggggaagaaacgatgtgacctacagaatattgtgtaagcggtgcagttgggagcagggcgaatgtgttccctgtgggagtaacattggatacatgccccagcagactggattagaggataactatgtcactgtcatggacctgctagcccacgctaattatacttttgaagttgaagctgtaaatggagtttctgacttaagccgatcccagaggctctttgctgctgtcagtatcaccactggtcaagcagctccctcgcaagtgagcggagtaatgaaggagagagtactgcagcggagtgtcgagctttcctggcaggaaccagagcatcccaatggagtcatcacagaatatgaaatcaagtattacgagaaagatcaaagggaacggacctactcaacagtaaaaaccaagtctacttcagcctccattaataatctgaaaccaggaacagtgtatgttttccagattcgggcttttactgctgctggttatggaaattacagtcccagacttgatgttgctacactagaggaagctacaggtaaaatgtttgaagctacagctgtctccagtgaacagaatcctgttattatcattgctgtggttgctgtagctgggaccatcattttggtgttcatggtctttggcttcatcattgggagaaggcactgtggttatagcaaagctgaccaagaaggcgatgaagagctttactttcattttaaatttccaggcaccaaaacctacattgaccctgaaacctatgaggacccaaatagagctgtccatcaattcgccaaggagctagatgcctcctgtattaaaattgagcgtgtgattggtgcaggagaattcggtgaagtctgcagtggccgtttgaaacttccagggaaaagagatgttgcagtagccataaaaaccctgaaagttggttacacagaaaaacaaaggagagactttttgtgtgaagcaagcatcatggggcagtttgaccacccaaatgttgtccatttggaaggggttgttacaagagggaaaccagtcatgatagtaatagagttcatggaaaatggagccctagatgcatttctcaggaaacatgatgggcaatttacagtcattcagttagtaggaatgctgagaggaattgctgctggaatgagatatttggctgatatgggatatgttcacagggaccttgcagctcgcaatattcttgtcaacagcaatctcgtttgtaaagtgtcagattttggcctgtcccgagttatagaggatgatccagaagctgtctatacaactactggtggaaaaattccagtaaggtggacagcacccgaagccatccagtaccggaaattcacatcagccagtgatgtatggagctatggaatagtcatgtgggaagttatgtcttatggagaaagaccttattgggacatgtcaaatcaagatgccaataagccctcttctggatcaaaacactcctgatttcactaccttttgttcagttggagaatggctacaagctattaagatggaaagatataaagataatttcacggcagctggctacaattcccttgaatcagtagccaggatgactattgaggatgtgatgagtttagggatcacactggttggtcatcaaaagaaaatcatgagcagcattcagactatgagagcacaaatgctacatttacatggaactggcattcaagtgtga

SEQ ID NO: 332 - DNA, 2830 bp, Artificial sequence
  A novel predicted alternative spliced variant
atggccctggattatctactactgctcctcctggcatccgcagtggctgcgatggaagaaacgttaatggacaccagaacggctactgcagagctgggctggacggccaatcctgcgtccgggtgggaagaagtcagtggctacgatgaaaacctgaacaccatccgcacctaccaggtgtgcaatgtcttcgagcccaaccagaacaattggctgctcaccaccttcatcaaccggcggggggcccatcgcatctacacagagatgcgcttcactgtgagagactgcagcagcctccctaatgtcccaggatcctgcaaggagaccttcaacttgtattactatgagactgactctgtcattgccaccaagaagtcagccttctggtctgaggccccctacctcaaagtagacaccattgctgcagatgagagcttctcccaggtggactttgggggaaggctgatgaaggtaaacacagaagtcaggagctttgggcctcttactcggaatggtttttacctcgcttttcaggattatggagcctgtatgtctcttctttctgtccgtgtcttcttcaaaaagtgtcccagcattgtgcaaaattttgcagtgtttccagagactatgacaggggcagagagcacatctctggtgattgctcggggcacatgcatccccaacgcagaggaagtggacgtgcccatcaaactctactgcaacggggatggggaatggatggtgcctattgggcgatgcacctgcaagcctggctatgagcctgagaacagcgtggcatgcaaggcttgccctgcagggacattcaaggccagccaggaagctgaaggctgctcccactgcccctccaacagccgctcccctgcagaggcgtctcccatctgcacctgtcggaccggttattaccgagcggactttgaccctccagaagtggcatgcactagcgtcccatcaggtccccgcaatgttatctccatcgtcaatgagacgtccatcattctggagtggcaccctccaagggagacaggtgggcgggatgatgtgacctacaacatcatctgcaaaaagtgccgggcagaccgccggagctgctcccgctgtgacgacaatgtggagtttgtgcccaggcagctgggcctgacggagtgccgcgtctccatcagcagcctgtgggcccacaccccctacacctttgacatccaggccatcaatggagtctccagcaagagtcccttccccccacagcacgtctctgtcaacatcaccacaaaccaagccggaacacaatgagttcaactcctccatggccaggagtcagaccaacacagcaaggattgatgggctgcggcctggcatggtatatgtggtacaggtgcgtgcccgcactgttgctggctacggcaagttcagtggcaagatgtgcttccagactctgactgacgatgattacaagtcagagctgagggagcagctgcccctgattgctggctcggcagcggccggggtcgtgttcgttgtgtccttggtggccatctctatcgtctgtagcaggaaacgggcttatagcaaagaggctgtgtacagcgataagctccagcattacagcacaggccgaggctccccagggatgaagatctacattgaccccttcacttatgaggatcccaacgaagctgtccgggagtttgccaaggagattgatgtatcttttgtgaaaattgaagaggtcatcggagcaggggagtttggagaagtgtacaaggggcgtttgaaactgccaggcaagagggaaatctacgtggccatcaagaccctgaaggcagggtactcggagaagcagcgtcgggactttctgagtgaggcgagcatcatgggccagttcgaccatcctaacatcattcgcctggagggtgtggtcaccaagagtcggcctgtcatgatcatcacagagttcatggagaatggtgcattggattctttcctcaggcaaaatgacgggcagttcaccgtgatccagcttgtgggtatgctcaggggcatcgctgctggcatgaagtacctggctgagatgaattatgtgcatcgggacctggctgctaggaacattctggtcaacagtaacctggtgtgcaaggtgtccgactttggcctctcccgctacctccaggatgacacctcagatcccacctacaccagctccttgggagggaagatccctgtgagatggacagctccagaggccatcgcctaccgcaagttcacttcagccagcgacgtttggagctatgggatcgtcatgtgggaagtcatgtcatttggagagagaccctattgggatatgtccaaccaagatgtcatcaatgccatcgagcaggactaccggctgcccccacccatggactgtccagctgctctacaccagctcatgctggactgttggcagaaggaccggaacagccggccccggtttgcggagattgtcaacaccctagataagatgatccggaacccggcaagtctcaagactgtggcaaccatcaccgccgtgccttcccagcccctgctcgaccgctccatcccagacttcacggcctttaccaccgtggatgactggctcagcgccatcaaaatggtccagtacagggacagcttcctcactgctggcttcacctccctccagctggtcacccagatgacatcagaagacctcctgagaataggcatcaccttggcaggccatcagaagaagatcctgaacagcattcattctatgagggtccagataagtcagtcaccaacggcaatggcatga

SEQ ID NO: 333 - DNA, 2846 bp, Artificial sequence
  A novel predicted alternative spliced variant
atggccctggattatctactactgctcctcctggcatccgcagtggctgcgatggaagaaacgttaatggacaccagaacggctactgcagagctgggctggacggccaatcctgcgtccgggtgggaagaagtcagtggctacgatgaaaacctgaacaccatccgcacctaccaggtgtgcaatgtcttcgagcccaaccagaacaattggctgctcaccaccttcatcaaccggcggggggcccatcgcatctacacagagatgcgcttcactgtgagagactgcagcagcctccctaatgtcccaggatcctgcaaggagaccttcaacttgtattactatgagactgactctgtcattgccaccaagaagtcagccttctggtctgaggccccctacctcaaagtagacaccattgctgcagatgagagcttctcccaggtggactttgggggaaggctgatgaaggtaaacacagaagtcaggagctttgggcctcttactcggaatggtttttacctcgcttttcaggattatggagcctgtatgtctcttctttctgtccgtgtcttcttcaaaaagtgtcccagcattgtgcaaaattttgcagtgtttccagagactatgacaggggcagagagcacatctctggtgattgctcggggcacatgcatccccaacgcagaggaagtggacgtgcccatcaaactctactgcaacggggatggggaatggatggtgcctattgggcgatgcacctgcaagcctggctatgagcctgagaacagcgtggcatgcaaggcttgccctgcagggacattcaaggccagccaggaagctgaaggctgctcccactgcccctccaacagccgctcccctgcagaggcgtctcccatctgcacctgtcggaccggttattaccgagcggactttgaccctccagaagtggcatgcactagcgtcccatcaggtccccgcaatgttatctccatcgtcaatgagacgtccatcattctggagtggcaccctccaagggagacaggtgggcgggatgatgtgacctacaacatcatctgcaaaaagtgccgggcagaccgccggagctgctcccgctgtgacgacaatgtggagtttgtgcccaggcagctgggcctgacggagtgccgcgtctccatcagcagcctgtgggcccacaccccctacacctttgacatccaggccatcaatggagtctccagcaagagtcccttccccccacagcacgtctctgtcaacatcaccacaaaccaagccgccccctccaccgttcccatcatgcaccaagtcagtgccactatgaggagcatcaccttgtcatggccacagccggagcagcccaatggcatcatcctggactatgagatccggtactatgagaaggaacacaatgagttcaactcctccatggccaggagtcagaccaacacagcaaggattgatgggctgcggcctggcatggtatatgtggtacaggtgcgtgcccgcactgttgctggctacggcaagttcagtggcaagatgtgcttccagactctgactgacggaaacgggcttatagcaaagaggctgtgtacagcgataagctccagcattacagcacaggccgaggctccccagggatgaagatctacattgaccccttcacttatgaggatcccaacgaagctgtccgggagtttgccaaggagattgatgtatcttttgtgaaaattgaagaggtcatcggagcaggggagtttggagaagtgtacaaggggcgtttgaaactgccaggcaagagggaaatctacgtggccatcaagaccctgaaggcagggtactcggagaagcagcgtcgggactttctgagtgaggcgagcatcatgggccagttcgaccatcctaacatcattcgcctggagggtgtggtcaccaagagtcggcctgtcatgatcatcacagagttcatggagaatggtgcattggattctttcctcaggcaaaatgacgggcagttcaccgtgatccagcttgtgggtatgctcaggggcatcgctgctggcatgaagtacctggctgagatgaattatgtgcatcgggacctggctgctaggaacattctggtcaacagtaacctggtgtgcaaggtgtccgactttggcctctcccgctacctccaggatgacacctcagatcccacctacaccagctccttgggagggaagatccctgtgagatggacagctccagaggccatcgcctaccgcaagttcacttcagccagcgacgtttggagctatgggatcgtcatgtgggaagtcatgtcatttggagagagaccctattgggatatgtccaaccaagatgtcatcaatgccatcgagcaggactaccggctgcccccacccatggactgtccagctgctctacaccagctcatgctggactgttggcagaaggaccggaacagccggccccggtttgcggagattgtcaacaccctagataagatgatccggaacccggcaagtctcaagactgtggcaaccatcaccgccgtgccttcccagcccctgctcgaccgctccatcccagacttcacggcctttaccaccgtggatgactggctcagcgccatcaaaatggtccagtacagggacagcttcctcactgctggcttcacctccctccagctggtcacccagatgacatcagaagacctcctgagaataggcatcaccttggcaggccatcagaagaagatcctgaacagcattcattctatgagggtccagataagtcagtcaccaacggcaatggcatga

SEQ ID NO: 334 - DNA, 2832 bp, Artificial sequence
  A novel predicted alternative spliced variant
atggccctggattatctactactgctcctcctggcatccgcagtggctgcgatggaagaaacgttaatggacaccagaacggctactgcagagctgggctggacggccaatcctgcgtccgggtgggaagaagtcagtggctacgatgaaaacctgaacaccatccgcacctaccaggtgtgcaatgtcttcgagcccaaccagaacaattggctgctcaccaccttcatcaaccggcggggggcccatcgcatctacacagagatgcgcttcactgtgagagactgcagcagcctccctaatgtcccaggatcctgcaaggagaccttcaacttgtattactatgagactgactctgtcattgccaccaagaagtcagccttctggtctgaggccccctacctcaaagtagacaccattgctgcagatgagagcttctcccaggtggactttgggggaaggctgatgaaggtaaacacagaagtcaggagctttgggcctcttactcggaatggtttttacctcgcttttcaggattatggagcctgtatgtctcttctttctgtccgtgtcttcttcaaaaagtgtcccagcattgtgcaaaattttgcagtgtttccagagactatgacaggggcagagagcacatctctggtgattgctcggggcacatgcatccccaacgcagaggaagtggacgtgcccatcaaactctactgcaacggggatggggaatggatggtgcctattgggcgatgcacctgcaagcctggctatgagcctgagaacagcgtggcatgcaaggcttgccctgcagggacattcaaggccagccaggaagctgaaggctgctcccactgcccctccaacagccgctcccctgcagaggcgtctcccatctgcacctgtcggaccggttattaccgagcggactttgaccctccagaagtggcatgcactagcgtcccatcaggtccccgcaatgttatctccatcgtcaatgagacgtccatcattctggagtggcaccctccaagggagacaggtgggcgggatgatgtgacctacaacatcatctgcaaaaagtgccgggcagaccgccggagctgctcccgctgtgacgacaatgtggagtttgtgcccaggcagctgggcctgacggagtgccgcgtctccatcagcagcctgtgggcccacaccccctacacctttgacatccaggccatcaatggagtctccagcaagagtcccttccccccacagcacgtctctgtcaacatcaccacaaaccaagccgccccctccaccgttcccatcatgcaccaagtcagtgccactatgaggagcatcaccttgtcatggccacagccggagcagcccaatggcatcatcctggactatgagatccggtactatgagaaggaacacaatgagttcaactcctccatggccaggagtcagaccaacacagcaaggattgatgggctgcggcctggcatggtatatgtggtacaggtgcgtgcccgcactgttgctggctacggcaagttcagtggcaagatgtgcttccagactctgactgacgatgattacaagtcagagctgagggagcagctgcccctgattgctggctcggcagcggccggggtcgtgttcgttgtgtccttggtggccatctctatcgtctgtagcaggaaacgggcttatagcaaagaggctgtgtacagcgataagctccagcattacagcacaggccgaggggagtttggagaagtgtacaaggggcgtttgaaactgccaggcaagagggaaatctacgtggccatcaagaccctgaaggcagggtactcggagaagcagcgtcgggactttctgagtgaggcgagcatcatgggccagttcgaccatcctaacatcattcgcctggagggtgtggtcaccaagagtcggcctgtcatgatcatcacagagttcatggagaatggtgcattggattctttcctcaggcaaaatgacgggcagttcaccgtgatccagcttgtgggtatgctcaggggcatcgctgctggcatgaagtacctggctgagatgaattatgtgcatcgggacctggctgctaggaacattctggtcaacagtaacctggtgtgcaaggtgtccgactttggcctctcccgctacctccaggatgacacctcagatcccacctacaccagctccttgggagggaagatccctgtgagatggacagctccagaggccatcgcctaccgcaagttcacttcagccagcgacgtttggagctatgggatcgtcatgtgggaagtcatgtcatttggagagagaccctattgggatatgtccaaccaagatgtcatcaatgccatcgagcaggactaccggctgcccccacccatggactgtccagctgctctacaccagctcatgctggactgttggcagaaggaccggaacagccggccccggtttgcggagattgtcaacaccctagataagatgatccggaacccggcaagtctcaagactgtggcaaccatcaccgccgtgccttcccagcccctgctcgaccgctccatcccagacttcacggcctttaccaccgtggatgactggctcagcgccatcaaaatggtccagtacagggacagcttcctcactgctggcttcacctccctccagctggtcacccagatgacatcagaagacctcctgagaataggcatcaccttggcaggccatcagaagaagatcctgaacagcattcattctatgagggtccagataagtcagtcaccaacggcaatggcatga

SEQ ID NO: 335 - DNA, 6787 bp, Artificial sequence
  A novel predicted alternative spliced variant
atgcgaatcctaaagcgtttcctcgcttgcattcagctcctctgtgtttgccgcctggattgggctaatggatactacagacaacagagaaaacttgttgaagagattggctggtcctatacaggagcactgaatcaaaaaaattggggaaagaaatatccaacatgtaatagcccaaaacaatctcctatcaatattgatgaagatcttacacaagtaaatgtgaatcttaagaaacttaaatttcagggttgggataaaacatcattggaaaacacattcattcataacactgggaaaacagtggaaattaatctcactaatgactaccgtgtcagcggaggagtttcagaaatggtgtttaaagcaagcaagataacttttcactggggaaaatgcaatatgtcatctgatggatcagagcatagtttagaaggacaaaaatttccacttgagatgcaaatctactgctttgatgcggaccgattttcaagttttgaggaagcagtcaaaggaaaagggaagttaagagctttatccattttgtttgaggttgggacagaagaaaatttggatttcaaagcgattattgatggagtcgaaagtgttagtcgttttgttggctgttttttgtgaagttcttacaatgcaacaatctggttatgtcatgctgatggactacttacaaaacaattttcgagagcaacagtacaagttctctagacaggtgttttcctcatacactggaaaggaagagattcatgaagcagtttgtagttcagaaccagaaaatgttcaggctgacccagagaattataccagccttcttgttacatgggaaagacctcgagtcgtttatgataccatgattgagaagtttgcagttttgtaccagcagttggatggagaggaccaaaccaagcatgaatttttgacagatggctatcaagacttgggtgctattctcaataatttgctacccaatatgagttatgttcttcagatagtagccatatgcactaatggcttatatggaaaatacagcgaccaactgattgtcgacatgcctactgataatcctgaacttgatcttttccctgaattaattggaactgaagaaataatcaaggaggaggaagagggaaaagacattgaagaaggcgctattgtgaatcctggtagagacagtgctacaaaccaaatcaggaaaaaggaaccccagatttctaccacaacacactacaatcgcatagggacgaaatacaatgaagccaagactaaccgatccccaacaagaggaagtgaattctctggaaagggtgatgttcccaatacatctttaaattccacttcccaaccagtcactaaattagccacagaaaaagatatttccttgacttctcagactgtgactgaactgccacctcacactgtggaaggtacttcagcctctttaaatgatggctctaaaactgttcttagatctccacatatgaacttgtcggggactgcagaatccttaaatacagtttctataacagaatatgaggaggagagtttattgaccagtttcaagcttgatactggagctgaagattcttcaggctccagtcccgcaacttctgctatcccattcatctctgagaacatatcccaagggtatatattttcctccgaaaacccagagacaataacatatgatgtccttataccagaatctgctagaaatgcttccgaagattcaacttcatcaggttcagaagaatcactaaaggatccttctatggagggaaatgtgtggtttcctagctctacagacataacagcacagcccgatgttggatcaggcagagagagctttctccagactaattacactgagatacgtgttgatgaatctgagaagacaaccaagtccttttctgcaggcccagtgatgtcacagggtccctcagttacagatctggaaatgccacattattctacctttgcctacttcccaactgaggtaacacctcatgcttttaccccatcctccagacaacaggatttggtctccacggtcaacgtggtatactcgcagacaacccaaccggtatacaatggtgagacacctcttcaaccttcctacagtagtgaagtctttcctctagtcacccctttgttgcttgacaatcagatcctcaacactacccctgctgcttcaagtagtgattcggccttgcatgctacgcctgtatttcccagtgtcgatgtgtcatttgaatccatcctgtcttcctatgatggtgcacctttgcttccattttcctctgcttccttcagtagtgaattgtttcgccatctgcatacagtttctcaaatccttccacaagttacttcagctaccgagagtgataaggtgcccttgcatgcttctctgccagtggctgggggtgatttgctattagagcccagccttgctcagtattctgatgtgctgtccactactcatgctgcttcagagacgctggaatttggtagtgaatctggtgttctttataaaacgcttatgttttctcaagttgaaccacccagcagtgatgccatgatgcatgcacgttcttcagggcctgaaccttcttatgccttgtctgataatgagggctcccaacacatcttcactgtttcttacagttctgcaatacctgtgcatgattctgtgggtgtaacttatcagggttccttatttagcggccctagccatataccaatacctaagtcttcgttaataaccccaactgcatcattactgcagcctactcatgccctctctggtgatggggaatggtctggagcctcttctgatagtgaatttcttttacctgacacagatgggctgacagcccttaacatttcttcacctgtttctgtagctgaatttacatatacaacatctgtgtttggtgatgataataaggcgctttctaaaagtgaaataatatatggaaatgagactgaactgcaaattccttctttcaatgagatggtttacccttctgaaagcacagtcatgcccaacatgtatgataatgtaaataagttgaatgcgtctttacaagaaacctctgtttccatttctagcaccaagggcatgtttccagggtcccttgctcataccaccactaaggtttttgatcatgagattagtcaagttccagaaaataacttttcagttcaacctacacatactgtctctcaagcatctggtgacacttcgcttaaacctgtgcttagtgcaaactcagagccagcatcctctgaccctgcttctagtgaaatgttatctccttcaactcagctcttattttatgagacctcagcttcttttagtactgaagtattgctacaaccttcctttcaggcttctgatgttgacaccttgcttaaaactgttcttccagctgtgcccagtgatccaatattggttgaaacccccaaagttgataaaattagttctacaatgttgcatctcattgtatcaaattctgcttcaagtgaaaacatgctgcactctacatctgtaccagtttttgatgtgtcgcctacttctcatatgcactctgcttcacttcaaggtttgaccatttcctatgcaagtgagaaatatgaaccagttttgttaaaaagtgaaagttcccaccaagtggtaccttctttgtacagtaatgatgagttgttccaaacggccaatttggagattaaccaggcccatcccccaaaaggaaggcatgtatttgctacacctgttttatcaattgatgaaccattaaatacactaataaataagcttatacattccgatgaaattttaacctccaccaaaagttctgttactggtaaggtatttgctggtattccaacagttgcttctgatacatttgtatctactgatcattctgttcctataggaaatgggcatgttgccattacagctgtttctccccacagagatggttctgtaacctcaacaaagttgctgtttccttctaaggcaacttctgagctgagtcatagtgccaaatctgatgccggtttagtgggtggtggtgaagatggtgacactgatgatgatggtgatgatgatgatgacagagatagtgatggcttatccattcataagtgtatgtcatgctcatcctatagagaatcacaggaaaaggtaatgaatgattcagacacccacgaaaacagtcttatggatcagaataatccaatctcatactcactatctgagaattctgaagaagataatagagtcacaagtgtatcctcagacagtcaaactggtatggacagaagtcctggtaaatcaccatcagcaaatgggctatcccaaaagcacaatgatggaaaagaggaaaatgacattcagactggtagtgctctgcttcctctcagccctgaatctaaagcatgggcagttctgacaagtgatgaagaaagtggatcagggcaaggtacctcagatagccttaatgagaatgagacttccacagatttcagttttgcagacactaatgaaaaagatgctgatgggatcctggcagcaggtgactcagaaataactcctggattcccacagtccccaacatcatctgttactagcgagaactcagaagtgttccacgtttcagaggcagaggccagtaatagtagccatgagtctcgtattggtctagctgaggggttggaatccgagaagaaggcagttataccccttgtgatcgtgtcagccctgacttttatctgtctagtggttcttgtgggtattctcatctactggaggaaatgcttccagactgcacacttttacttagaggacagtacatcccctagagttatatccacacctccaacacctatctttccaatttcagatgatgtcggagcaattccaataaagcactttccaaagcatgttgcagatttacatgcaagtagtgggtttactgaagaatttgagacactgaaagagttttaccaggaagtgcagagctgtactgttgacttaggtattacagcagacagctccaaccacccagacaacaagcacaagaatcgatacataaatatcgttgcctatgatcatagcagggttaagctagcacagcttgctgaaaaggatggcaaactgactgattatatcaatgccaattatgttgatggctacaacagaccaaaagcttatattgctgcccaaggcccactgaaatccacagctgaagatttctggagaatgatatgggaacataatgtggaagttattgtcatgataacaaacctcgtggagaaaggaaggagaaaatgtgatcagtactggcctgccgatgggagtgaggagtacgggaactttctggtcactcagaagagtgtgcaagtgcttgcctattatactgtgaggaattttactctaagaaacacaaaaataaaaaagggctcccagaaaggaagacccagtggacgtgtggtcacacagtatcactacacgcagtggcctgacatgggagtaccagagtactccctgccagtgctgacctttgtgagaaaggcagcctatgccaagcgccatgcagtggggcctgttgtcgtccactgcagtgctggagttggaagaacaggcacatatattgtgctagacagtatgttgcagcagattcaacacgaaggaactgtcaacatatttggcttcttaaaacacatccgttcacaaagaaattatttggtacaaactgaggagcaatatgtcttcattcatgatacactggttgaggccatacttagtaaagaaactgaggtgctggacagtcatattcatgcctatgttaatgcactcctcattcctggaccagcaggcaaaacaaagctagagaaacaattccagctcctgagccagtcaaatatacagcagagtgactattctgcagccctaaagcaatgcaacagggaaaagaatcgaacttcttctatcatccctgtggaaagatcaagggttggcatttcatccctgagtggagaaggcacagactacatcaatgcctcctatatcatgggctattaccagagcaatgaattcatcattacccagcaccctctccttcataccatcaaggatttctggaggatgatatgggaccataatgcccaactggtggttatgattcctgatggccaaaacatggcagaagatgaatttgtttactggccaaataaagatgagcctataaattgtgagagctttaaggtcactcttatggctgaagaacacaaatgtctatctaatgaggaaaaacttataattcaggactttatcttagaagctacacaggatgattatgtacttgaagtgaggcactttcagtgtcctaaatggccaaatccagatagccccattagtaaaacttttgaacttataagtgttataaaagaagaagctgccaatagggatgggcctatgattgttcatgatgagcatggaggagtgacggcaggaactttctgtgctctgacaacccttatgcaccaactagaaaaagaaaattccgtggatgtttaccaggtagccaagatgatcaatctgatgaggccaggagtctttgctgacattgagcagtatcagtttctctacaaagtgatcctcagccttgtgagcacaaggcaggaagagaatccatccacctctctggacagtaatggtgcagcattgcctgatggaaatatagctgagagcttagagtctttagtttaa

SEQ ID NO: 336 - DNA, 6898 bp, Artificial sequence
  A novel predicted alternative spliced variant
atgcgaatcctaaagcgtttcctcgcttgcattcagctcctctgtgtttgccgcctggattgggctaatggatactacagacaacagagaaaacttgttgaagagattggctggtcctatacaggagcactgaatcaaaaaaattggggaaagaaatatccaacatgtaatagcccaaaacaatctcctatcaatattgatgaagatcttacacaagtaaatgtgaatcttaagaaacttaaatttcagggttgggataaaacatcattggaaaacacattcattcataacactgggaaaacagtggaaattaatctcactaatgactaccgtgtcagcggaggagtttcagaaatggtgtttaaagcaagcaagataacttttcactggggaaaatgcaatatgtcatctgatggatcagagcatagtttagaaggacaaaaatttccacttgagatgcaaatctactgctttgatgcggaccgattttcaagttttgaggaagcagtcaaaggaaaagggaagttaagagctttatccattttgtttgaggttgggacagaagaaaatttggatttcaaagcgattattgatggagtcgaaagtgttagtcgttttgggaagcaggctgctttagatccattcatactgttgaaccttctgccaaactcaactgacaagtattacatttacaatggctcattgacatctcctccctgcacagacacagttgactggattgtttttaaagatacagttagcatctctgaaagccagttggctgttttttgtgaagttcttacaatgcaacaatctggttatgtcatgctgatggactacttacaaaacaattttcgagagcaacagtacaagttctctagacaggtgttttcctcatacactggaaaggaagagattcatgaagcagtttgtagttcagaaccagaaaatgttcaggctgacccagagaattataccagccttcttgttacatgggaaagacctcgagtcgtttatgataccatgattgagaagtttgcagttttgtaccagcagttggatggagaggaccaaaccaagcatgaatttttgacagatggctatcaagacttgggtgctattctcaataatttgctacccaatatgagttatgttcttcagatagtagccatatgcactaatggcttatatggaaaatacagcgaccaactgattgtcgacatgcctactgataatcctggaggaggaagagggaaaagacattgaagaaggcgctattgtgaatcctggtagagacagtgctacaaaccaaatcaggaaaaaggaaccccagatttctaccacaacacactacaatcgcatagggacgaaatacaatgaagccaagactaaccgatccccaacaagaggaagtgaattctctggaaagggtgatgttcccaatacatctttaaattccacttcccaaccagtcactaaattagccacagaaaaagatatttccttgacttctcagactgtgactgaactgccacctcacactgtggaaggtacttcagcctctttaaatgatggctctaaaactgttcttagatctccacatatgaacttgtcggggactgcagaatccttaaatacagtttctataacagaatatgaggaggagagtttattgaccagtttcaagcttgatactggagctgaagattcttcaggctccagtcccgcaacttctgctatcccattcatctctgagaacatatcccaagggtatatattttcctccgaaaacccagagacaataacatatgatgtccttataccagaatctgctagaaatgcttccgaagattcaacttcatcaggttcagaagaatcactaaaggatccttctatggagggaaatgtgtggtttcctagctctacagacataacagcacagcccgatgttggatcaggcagagagagctttctccagactaattacactgagatacgtgttgatgaatctgagaagacaaccaagtccttttctgcaggcccagtgatgtcacagggtccctcagttacagatctggaaatgccacattattctacctttgcctacttcccaactgaggtaacacctcatgcttttaccccatcctccagacaacaggatttggtctccacggtcaacgtggtatactcgcagacaacccaaccggtatacaatggtgagacacctcttcaaccttcctacagtagtgaagtctttcctctagtcacccctttgttgcttgacaatcagatcctcaacactacccctgctgcttcaagtagtgattcggccttgcatgctacgcctgtatttcccagtgtcgatgtgtcatttgaatccatcctgtcttcctatgatggtgcacctttgcttccattttcctctgcttccttcagtagtgaattgtttcgccatctgcatacagtttctcaaatccttccacaagttacttcagctaccgagagtgataaggtgcccttgcatgcttctctgccagtggctgggggtgatttgctattagagcccagccttgctcagtattctgatgtgctgtccactactcatgctgcttcagagacgctggaatttggtagtgaatctggtgttctttataaaacgcttatgttttctcaagttgaaccacccagcagtgatgccatgatgcatgcacgttcttcagggcctgaaccttcttatgccttgtctgataatgagggctcccaacacatcttcactgtttcttacagttctgcaatacctgtgcatgattctgtgggtgtaacttatcagggttccttatttagcggccctagccatataccaatacctaagtcttcgttaataaccccaactgcatcattactgcagcctactcatgccctctctggtgatggggaatggtctggagcctcttctgatagtgaatttcttttacctgacacagatgggctgacagcccttaacatttcttcacctgtttctgtagctgaatttacatatacaacatctgtgtttggtgatgataataaggcgctttctaaaagtgaaataatatatggaaatgagactgaactgcaaattccttctttcaatgagatggtttacccttctgaaagcacagtcatgcccaacatgtatgataatgtaaataagttgaatgcgtctttacaagaaacctctgtttccatttctagcaccaagggcatgtttccagggtcccttgctcataccaccactaaggtttttgatcatgagattagtcaagttccagaaaataacttttcagttcaacctacacatactgtctctcaagcatctggtgacacttcgcttaaacctgtgcttagtgcaaactcagagccagcatcctctgaccctgcttctagtgaaatgttatctccttcaactcagctcttattttatgagacctcagcttcttttagtactgaagtattgctacaaccttcctttcaggcttctgatgttgacaccttgcttaaaactgttcttccagctgtgcccagtgatccaatattggttgaaacccccaaagttgataaaattagttctacaatgttgcatctcattgtatcaaattctgcttcaagtgaaaacatgctgcactctacatctgtaccagtttttgatgtgtcgcctacttctcatatgcactctgcttcacttcaaggtttgaccatttcctatgcaagtgagaaatatgaaccagttttgttaaaaagtgaaagttcccaccaagtggtaccttctttgtacagtaatgatgagttgttccaaacggccaatttggagattaaccaggcccatcccccaaaaggaaggcatgtatttgctacacctgttttatcaattgatgaaccattaaatacactaataaataagcttatacattccgatgaaattttaacctccaccaaaagttctgttactggtaaggtatttgctggtattccaacagttgcttctgatacatttgtatctactgatcattctgttcctataggaaatgggcatgttgccattacagctgtttctccccacagagatggttctgtaacctcaacaaagttgctgtttccttctaaggcaacttctgagctgagtcatagtgccaaatctgatgccggtttagtgggtggtggtgaagatggtgacactgatgatgatggtgatgatgatgatgacagagatagtgatggcttatccattcataagtgtatgtcatgctcatcctatagagaatcacaggaaaaggtaatgaatgattcagacacccacgaaaacagtcttatggatcagaataatccaatctcatactcactatctgagaattctgaagaagataatagagtcacaagtgtatcctcagacagtcaaactggtatggacagaagtcctggtaaatcaccatcagcaaatgggctatcccaaaagcacaatgatggaaaagaggaaaatgacattcagactggtagtgctctgcttcctctcagccctgaatctaaagcatgggcagttctgacaagtgatgaagaaagtggatcagggcaaggtacctcagatagccttaatgagaatgagacttccacagatttcagttttgcagacactaatgaaaaagatgctgatgggatcctggcagcaggtgactcagaaataactcctggattcccacagtccccaacatcatctgttactagcgagaactcagaagtgttccacgtttcagaggcagaggccagtaatagtagccatgagtctcgtattggtctagctgaggggttggaatccgagaagaaggcagttataccccttgtgatcgtgtcagccctgacttttatctgtctagtggttcttgtgggtattctcatctactggaggaaatgcttccagactgcacacttttacttagaggacagtacatcccctagagttatatccacacctccaacacctatctttccaatttcagatgatgtcggagcaattccaataaagcactttccaaagcatgttgcagatttacatgcaagtagtgggtttactgaagaatttgagacactgaaagagttttaccaggaagtgcagagctgtactgttgacttaggtattacagcagacagctccaaccacccagacaacaagcacaagaatcgatacataaatatcgttgcctatgatcatagcagggttaagctagcacagcttgctgaaaaggatggcaaactgactgattatatcaatgccaattatgttgatggctacaacagaccaaaagcttatattgctgcccaaggcccactgaaatccacagctgaagatttctggagaatgatatgggaacataatgtggaagttattgtcatgataacaaacctcgtggagaaaggaaggagaaaatgtgatcagtactggcctgccgatgggagtgaggagtacgggaactttctggtcactcagaagagtgtgcaagtgcttgcctattatactgtgaggaattttactctaagaaacacaaaaataaaaaagggctcccagaaaggaagacccagtggacgtgtggtcacacagtatcactacacgcagtggcctgacatgggagtaccagagtactccctgccagtgctgacctttgtgagaaaggcagcctatgccaagcgccatgcagtggggcctgttgtcgtccactgcagtgctggagttggaagaacaggcacatatattgtgctagacagtatgttgcagcagattcaacacgaaggaactgtcaacatatttggcttcttaaaacacatccgttcacaaagaaattatttggtacaaactgaggagcaatatgtcttcattcatgatacactggttgaggccatacttagtaaagaaactgaggtgctggacagtcatattcatgcctatgttaatgcactcctcattcctggaccagcaggcaaaacaaagctagagaaacaattccagctcctgagccagtcaaatatacagcagagtgactattctgcagccctaaagcaatgcaacagggaaaagaatcgaacttcttctatcatccctgtggaaagatcaagggttggcatttcatccctgagtggagaaggcacagactacatcaatgcctcctatatcatgggctattaccagagcaatgaattcatcattacccagcaccctctccttcataccatcaaggatttctggaggatgatatgggaccataatgcccaactggtggttatgattcctgatggccaaaacatggcagaagatgaatttgtttactggccaaataaagatgagcctataaattgtgagagctttaaggtcactcttatggctgaagaacacaaatgtctatctaatgaggaaaaacttataattcaggactttatcttagaagctacacaggatgattatgtacttgaagtgaggcactttcagtgtcctaaatggccaaatccagatagccccattagtaaaacttttgaacttataagtgttataaaagaagaagctgccaatagggatgggcctatgattgttcatgatgagcatggaggagtgacggcaggaactttctgtgctctgacaacccttatgcaccaactagaaaaagaaaattccgtggatgtttaccaggtagccaagatgatcaatctgatgaggccaggagtctttgctgacattgagcagtatcagtttctctacaaagtgatcctcagccttgtgagcacaaggcaggaagagaatccatccacctctctggacagtaatggtgcagcattgcctgatggaaatatagctgagagcttagagtctttagtttaa

SEQ ID NO: 337 - DNA, 6800 bp, Artificial sequence
  A novel predicted alternative spliced variant
atgcgaatcctaaagcgtttcctcgcttgcattcagctcctctgtgtttgccgcctggattgggctaatggatactacagacaacagagaaaacttgttgaagagattggctggtcctatacaggagcactgaatcaaaaaaattggggaaagaaatatccaacatgtaatagcccaaaacaatctcctatcaatattgatgaagatcttacacaagtaaatgtgaatcttaagaaacttaaatttcagggttgggataaaacatcattggaaaacacattcattcataacactgggaaaacagtggaaattaatctcactaatgactaccgtgtcagcggaggagtttcagaaatggtgtttaaagcaagcaagataacttttcactggggaaaatgcaatatgtcatctgatggatcagagcatagtttagaaggacaaaaatttccacttgagatgcaaatctactgctttgatgcggaccgattttcaagttttgaggaagcagtcaaaggaaaagggaagttaagagctttatccattttgtttgaggttgggacagaagaaaatttggatttcaaagcgattattgatggagtcgaaagtgttagtcgttttgggaagcaggctgctttagatccattcatactgttgaaccttctgccaaactcaactgacaagtattacatttacaatggctcattgacatctcctccctgcacagacacagttgactggattgtttttaaagatacagttagcatctctgaaagccagttggctgttttttgtgaagttcttacaatgcaacaatctggttatgtcatgctgatggactacttacaaaacaattttcgagagcaacagtacaagttctctagacaggtgttttcctcatacactggaaaggaagagattcatgaagcagtttgtagttcagaaccagaaaatgttcaggctgacccagagaattataccagccttcttgttacatgggaaagacctcgagtcgtttatgataccatgattgagaagtttgcagttttgtaccagcagttggatggagaggaccaaaccaagcatgaatttttgacagatggctatcaagacttgggtgctattctcaataatttgctacccaatatgagttatgttcttcagatagtagccatatgcactaatggcttatatggaaaatacagcgaccaactgattgtcgacatgcctactgataatcctgaacttgatcttttccctgaattaattggaactgaagaaataatcaaggaggaggaagagggaaaagacattgaagaaggcgctattgtgaatcctggtagagacagtgctacaaaccaaatcaggaaaaaggaaccccagatttctaccacaacacactacaatcgcatagggacgaaatacaatgaagccaagactaaccgatccccaacaagaggaagtgaattctctggaaagggtgatgttcccaatacatctttaaattccacttcccaaccagtcactaaattagccacagaaaaagatatttccttgacttctcagactgtgactgaactgccacctcacactgtggaaggtacttcagcctctttaaatgatggctctaaaactgttcttagatctccacatatgaacttgtcggggactgcagaatccttaaatacagtttctataacagaatatgaggaggagagtttattgaccagtttcaagcttgatactggagctgaagattcttcaggctccagtcccgcaacttctgctatcccattcatctctgagaacatatcccaagggtatatattttcctccgaaaacccagagacaataacatatgatgtccttataccagaatctgctagaaatgcttccgaagattcaacttcatcaggttcagaagaatcactaaaggatccttctatggagggaaatgtgtggtttcctagctctacagacataacagcacagcccgatgttggatcaggcagagagagctttctccagactaattacactgagatacgtgttgatgaatctgagaagacaaccaagtccttttctgcaggcccagtgatgtcacagggtccctcagttacagatctggaaatgccacattattctacctttgcctacttcccaactgaggtaacacctcatgcttttaccccatcctccagacaacaggatttggtctccacggtcaacgtggtatactcgcagacaacccaaccggtatacaatggtgagacacctcttcaaccttcctacagtagtgaagtctttcctctagtcacccctttgttgcttgacaatcagatcctcaacactacccctgctgcttcaagtagtgattcggccttgcatgctacgcctgtatttcccagtgtcgatgtgtcatttgaatccatcctgtcttcctatgatggtgcacctttgcttccattttcctctgcttccttcagtagtgaattgtttcgccatctgcatacagtttctcaaatccttccacaagttacttcagctaccgagagtgataaggtgcccttgcatgcttctctgccagtggctgggggtgatttgctattagagcccagccttgctcagtattctgatgtgctgtccactactcatgctgcttcagagacgctggaatttggtagtgaatctggtgttctttataaaacgcttatgttttctcaagttgaaccacccagcagtgatgccatgatgcatgcacgttcttcagggcctgaaccttcttatgccttgtctgataatgagggctcccaacacatcttcactgtttcttacagttctgcaatacctgtgcatgattctgtgggtgtaacttatcagggttccttatttagcggccctagccatataccaatacctaagtcttcgttaataaccccaactgcatcattactgcagcctactcatgccctctctggtgatggggaatggtctggagcctcttctgatagtgaatttcttttacctgacacagatgggctgacagcccttaacatttcttcacctgtttctgtagctgaatttacatatacaacatctgtgtttggtgatgataataaggcgctttctaaaagtgaaataatatatggaaatgagactgaactgcaaattccttctttcaatgagatggtttacccttctgaaagcacagtcatgcccaacatgtatgataatgtaaataagttgaatgcgtctttacaagaaacctctgtttccatttctagcaccaagggcatgtttccagggtcccttgctcataccaccactaaggtttttgatcatgagattagtcaagttccagaaaataacttttcagttcaacctacacatactgtctctcaagcatctggtgacacttcgcttaaacctgtgcttagtgcaaactcagagccagcatcctctgaccctgcttctagtgaaatgttatctccttcaactcagctcttattttatgagacctcagcttcttttagtactgaagtattgctacaaccttcctttcaggcttctgatgttgacaccttgcttaaaactgttcttccagctgtgcccagtgatccaatattggttgaaacccccaaagttgataaaattagttctacaatgttgcatctcattgtatcaaattctgcttcaagtgaaaacatgctgcactctacatctgtaccagtttttgatgtgtcgcctacttctcatatgcactctgcttcacttcaaggtttgaccatttcctatgcaagtgagaaatatgaaccagttttgttaaaaagtgaaagttcccaccaagtggtaccttctttgtacagtaatgatgagttgttccaaacggccaatttggagattaaccaggcccatcccccaaaaggaaggcatgtatttgctacacctgttttatcaattgatgaaccattaaatacactaataaataagcttatacattccgatgaaattttaacctccaccaaaagttctgttactggtaaggtatttgctggtattccaacagttgcttctgatacatttgtatctactgatcattctgttcctataggaaatgggcatgttgccattacagctgtttctccccacagagatggttctgtaacctcaacaaagttgctgtttccttctaaggcaacttctgagctgagtcatagtgccaaatctgatgccggtttagtgggtggtggtgaagatggtgacactgatgatgatggtgatgatgatgatgacagagatagtgatggcttatccattcataagtgtatgtcatgctcatcctatagagaatcacaggaaaaggtaatgaatgattcagacacccacgaaaacagtcttatggatcagaataatccaatctcatactcactatctgagaattctgaagaagataatagagtcacaagtgtatcctcagacagtcaaactggtatggacagaagtcctggtaaatcaccatcagcaaatgggctatcccaaaagcacaatgatggaaaagaggaaaatgacattcagactggtagtgctctgcttcctctcagccctgaatctaaagcatgggcagttctgacaagtgatgaagaaagtggatcagggcaaggtacctcagatagccttaatgagaatgagacttccacagatttcagttttgcagacactaatgaaaaagatgctgatgggatcctggcagcaggtgactcagaaataactcctggattcccacagtccccaacatcatctgttactagcgagaactcagaagtgttccacgtttcagaggcaggaaatgcttccagactgcacacttttacttagaggacagtacatcccctagagttatatccacacctccaacacctatctttccaatttcagatgatgtcggagcaattccaataaagcactttccaaagcatgttgcagatttacatgcaagtagtgggtttactgaagaatttgagacactgaaagagttttaccaggaagtgcagagctgtactgttgacttaggtattacagcagacagctccaaccacccagacaacaagcacaagaatcgatacataaatatcgttgcctatgatcatagcagggttaagctagcacagcttgctgaaaaggatggcaaactgactgattatatcaatgccaattatgttgatggctacaacagaccaaaagcttatattgctgcccaaggcccactgaaatccacagctgaagatttctggagaatgatatgggaacataatgtggaagttattgtcatgataacaaacctcgtggagaaaggaaggagaaaatgtgatcagtactggcctgccgatgggagtgaggagtacgggaactttctggtcactcagaagagtgtgcaagtgcttgcctattatactgtgaggaattttactctaagaaacacaaaaataaaaaagggctcccagaaaggaagacccagtggacgtgtggtcacacagtatcactacacgcagtggcctgacatgggagtaccagagtactccctgccagtgctgacctttgtgagaaaggcagcctatgccaagcgccatgcagtggggcctgttgtcgtccactgcagtgctggagttggaagaacaggcacatatattgtgctagacagtatgttgcagcagattcaacacgaaggaactgtcaacatatttggcttcttaaaacacatccgttcacaaagaaattatttggtacaaactgaggagcaatatgtcttcattcatgatacactggttgaggccatacttagtaaagaaactgaggtgctggacagtcatattcatgcctatgttaatgcactcctcattcctggaccagcaggcaaaacaaagctagagaaacaattccagctcctgagccagtcaaatatacagcagagtgactattctgcagccctaaagcaatgcaacagggaaaagaatcgaacttcttctatcatccctgtggaaagatcaagggttggcatttcatccctgagtggagaaggcacagactacatcaatgcctcctatatcatgggctattaccagagcaatgaattcatcattacccagcaccctctccttcataccatcaaggatttctggaggatgatatgggaccataatgcccaactggtggttatgattcctgatggccaaaacatggcagaagatgaatttgtttactggccaaataaagatgagcctataaattgtgagagctttaaggtcactcttatggctgaagaacacaaatgtctatctaatgaggaaaaacttataattcaggactttatcttagaagctacacaggatgattatgtacttgaagtgaggcactttcagtgtcctaaatggccaaatccagatagccccattagtaaaacttttgaacttataagtgttataaaagaagaagctgccaatagggatgggcctatgattgttcatgatgagcatggaggagtgacggcaggaactttctgtgctctgacaacccttatgcaccaactagaaaaagaaaattccgtggatgtttaccaggtagccaagatgatcaatctgatgaggccaggagtctttgctgacattgagcagtatcagtttctctacaaagtgatcctcagccttgtgagcacaaggcaggaagagaatccatccacctctctggacagtaatggtgcagcattgcctgatggaaatatagctgagagcttagagtctttagtttaa

SEQ ID NO: 338 - DNA, 6859 bp, Artificial sequence
  A novel predicted alternative spliced variant
atgcgaatcctaaagcgtttcctcgcttgcattcagctcctctgtgtttgccgcctggattgggctaatggatactacagacaacagagaaaacttgttgaagagattggctggtcctatacaggagcactgaatcaaaaaaattggggaaagaaatatccaacatgtaatagcccaaaacaatctcctatcaatattgatgaagatcttacacaagtaaatgtgaatcttaagaaacttaaatttcagggttgggataaaacatcattggaaaacacattcattcataacactgggaaaacagtggaaattaatctcactaatgactaccgtgtcagcggaggagtttcagaaatggtgtttaaagcaagcaagataacttttcactggggaaaatgcaatatgtcatctgatggatcagagcatagtttagaaggacaaaaatttccacttgagatgcaaatctactgctttgatgcggaccgattttcaagttttgaggaagcagtcaaaggaaaagggaagttaagagctttatccattttgtttgaggttgggacagaagaaaatttggatttcaaagcgattattgatggagtcgaaagtgttagtcgttttgggaagcaggctgctttagatccattcatactgttgaaccttctgccaaactcaactgacaagtattacatttacaatggctcattgacatctcctccctgcacagacacagttgactggattgtttttaaagatacagttagcatctctgaaagccagttggctgttttttgtgaagttcttacaatgcaacaatctggttatgtcatgctgatggactacttacaaaacaattttcgagagcaacagtacaagttctctagacaggtgttttcctcatacactggaaaggaagagattcatgaagcagtttgtagttcagaaccagaaaatgttcaggctgacccagagaattataccagccttcttgttacatgggaaagacctcgagtcgtttatgataccatgattgagaagtttgcagttttgtaccagcagttggatggagaggaccaaaccaagcatgaatttttgacagatggctatcaagacttgggtgctattctcaataatttgctacccaatatgagttatgttcttcagatagtagccatatgcactaatggcttatatggaaaatacagcgaccaactgattgtcgacatgcctactgataatcctgaacttgatcttttccctgaattaattggaactgaagaaataatcaaggaggaggaagagggaaaagacattgaagaaggcgctattgtgaatcctggtagagacagtgctacaaaccaaatcaggaaaaaggaaccccagatttctaccacaacacactacaatcgcatagggacgaaatacaatgaagccaagactaaccgatccccaacaagaggaagtgaattctctggaaagggtgatgttcccaatacatctttaaattccacttcccaaccagtcactaaattagccacagaaaaagatatttccttgacttctcagactgtgactgaactgccacctcacactgtggaaggtacttcagcctctttaaatgatggctctaaaactgttcttagatctccacatatgaacttgtcggggactgcagaatccttaaatacagtttctataacagaatatgaggaggagagtttattgaccagtttcaagcttgatactggagctgaagattcttcaggctccagtcccgcaacttctgctatcccattcatctctgagaacatatcccaagggtatatattttcctccgaaaacccagagacaataacatatgatgtccttataccagaatctgctagaaatgcttccgaagattcaacttcatcaggttcagaagaatcactaaaggatccttctatggagggaaatgtgtggtttcctagctctacagacataacagcacagcccgatgttggatcaggcagagagagctttctccagactaattacactgagatacgtgttgatgaatctgagaagacaaccaagtccttttctgcaggcccagtgatgtcacagggtccctcagttacagatctggaaatgccacattattctacctttgcctacttcccaactgaggtaacacctcatgcttttaccccatcctccagacaacaggatttggtctccacggtcaacgtggtatactcgcagacaacccaaccggtatacaatggtgagacacctcttcaaccttcctacagtagtgaagtctttcctctagtcacccctttgttgcttgacaatcagatcctcaacactacccctgctgcttcaagtagtgattcggccttgcatgctacgcctgtatttcccagtgtcgatgtgtcatttgaatccatcctgtcttcctatgatggtgcacctttgcttccattttcctctgcttccttcagtagtgaattgtttcgccatctgcatacagtttctcaaatccttccacaagttacttcagctaccgagagtgataaggtgcccttgcatgcttctctgccagtggctgggggtgatttgctattagagcccagccttgctcagtattctgatgtgctgtccactactcatgctgcttcagagacgctggaatttggtagtgaatctggtgttctttataaaacgcttatgttttctcaagttgaaccacccagcagtgatgccatgatgcatgcacgttcttcagggcctgaaccttcttatgccttgtctgataatgagggctcccaacacatcttcactgtttcttacagttctgcaatacctgtgcatgattctgtgggtgtaacttatcagggttccttatttagcggccctagccatataccaatacctaagtcttcgttaataaccccaactgcatcattactgcagcctactcatgccctctctggtgatggggaatggtctggagcctcttctgatagtgaatttcttttacctgacacagatgggctgacagcccttaacatttcttcacctgtttctgtagctgaatttacatatacaacatctgtgtttggtgatgataataaggcgctttctaaaagtgaaataatatatggaaatgagactgaactgcaaattccttctttcaatgagatggtttacccttctgaaagcacagtcatgcccaacatgtatgataatgtaaataagttgaatgcgtctttacaagaaacctctgtttccatttctagcaccaagggcatgtttccagggtcccttgctcataccaccactaaggtttttgatcatgagattagtcaagttccagaaaataacttttcagttcaacctacacatactgtctctcaagcatctggtgacacttcgcttaaacctgtgcttagtgcaaactcagagccagcatcctctgaccctgcttctagtgaaatgttatctccttcaactcagctcttattttatgagacctcagcttcttttagtactgaagtattgctacaaccttcctttcaggcttctgatgttgacaccttgcttaaaactgttcttccagctgtgcccagtgatccaatattggttgaaacccccaaagttgataaaattagttctacaatgttgcatctcattgtatcaaattctgcttcaagtgaaaacatgctgcactctacatctgtaccagtttttgatgtgtcgcctacttctcatatgcactctgcttcacttcaaggtttgaccatttcctatgcaagtgagaaatatgaaccagttttgttaaaaagtgaaagttcccaccaagtggtaccttctttgtacagtaatgatgagttgttccaaacggccaatttggagattaaccaggcccatcccccaaaaggaaggcatgtatttgctacacctgttttatcaattgatgaaccattaaatacactaataaataagcttatacattccgatgaaattttaacctccaccaaaagttctgttactggtaaggtatttgctggtattccaacagttgcttctgatacatttgtatctactgatcattctgttcctataggaaatgggcatgttgccattacagctgtttctccccacagagatggttctgtaacctcaacaaagttgctgtttccttctaaggcaacttctgagctgagtcatagtgccaaatctgatgccggtttagtgggtggtggtgaagatggtgacactgatgatgatggtgatgatgatgatgacagagatagtgatggcttatccattcataagtgtatgtcatgctcatcctatagagaatcacaggaaaaggtaatgaatgattcagacacccacgaaaacagtcttatggatcagaataatccaatctcatactcactatctgagaattctgaagaagataatagagtcacaagtgtatcctcagacagtcaaactggtatggacagaagtcctggtaaatcaccatcagcaaatgggctatcccaaaagcacaatgatggaaaagaggaaaatgacattcagactggtagtgctctgcttcctctcagccctgaatctaaagcatgggcagttctgacaagtgatgaagaaagtggatcagggcaaggtacctcagatagccttaatgagaatgagacttccacagatttcagttttgcagacactaatgaaaaagatgctgatgggatcctggcagcaggtgactcagaaataactcctggattcccacagtccccaacatcatctgttactagcgagaactcagaagtgttccacgtttcagaggcagaggccagtaatagtagccatgagtctcgtattggtctagctgaggggttggaatccgagaagaaggcagttataccccttgtgatcgtgtcagccctgacttttatctgtctagtggttcttgtgggtattctcatctactggaggaaatgcttccagactgcacacttttacttagaggacagtacatcccctagagttatatccacacctccaacacctatctttccaatttcagacactgaaagagttttaccaggaagtgcagagctgtactgttgacttaggtattacagcagacagctccaaccacccagacaacaagcacaagaatcgatacataaatatcgttgcctatgatcatagcagggttaagctagcacagcttgctgaaaaggatggcaaactgactgattatatcaatgccaattatgttgatggctacaacagaccaaaagcttatattgctgcccaaggcccactgaaatccacagctgaagatttctggagaatgatatgggaacataatgtggaagttattgtcatgataacaaacctcgtggagaaaggaaggagaaaatgtgatcagtactggcctgccgatgggagtgaggagtacgggaactttctggtcactcagaagagtgtgcaagtgcttgcctattatactgtgaggaattttactctaagaaacacaaaaataaaaaagggctcccagaaaggaagacccagtggacgtgtggtcacacagtatcactacacgcagtggcctgacatgggagtaccagagtactccctgccagtgctgacctttgtgagaaaggcagcctatgccaagcgccatgcagtggggcctgttgtcgtccactgcagtgctggagttggaagaacaggcacatatattgtgctagacagtatgttgcagcagattcaacacgaaggaactgtcaacatatttggcttcttaaaacacatccgttcacaaagaaattatttggtacaaactgaggagcaatatgtcttcattcatgatacactggttgaggccatacttagtaaagaaactgaggtgctggacagtcatattcatgcctatgttaatgcactcctcattcctggaccagcaggcaaaacaaagctagagaaacaattccagctcctgagccagtcaaatatacagcagagtgactattctgcagccctaaagcaatgcaacagggaaaagaatcgaacttcttctatcatccctgtggaaagatcaagggttggcatttcatccctgagtggagaaggcacagactacatcaatgcctcctatatcatgggctattaccagagcaatgaattcatcattacccagcaccctctccttcataccatcaaggatttctggaggatgatatgggaccataatgcccaactggtggttatgattcctgatggccaaaacatggcagaagatgaatttgtttactggccaaataaagatgagcctataaattgtgagagctttaaggtcactcttatggctgaagaacacaaatgtctatctaatgaggaaaaacttataattcaggactttatcttagaagctacacaggatgattatgtacttgaagtgaggcactttcagtgtcctaaatggccaaatccagatagccccattagtaaaacttttgaacttataagtgttataaaagaagaagctgccaatagggatgggcctatgattgttcatgatgagcatggaggagtgacggcaggaactttctgtgctctgacaacccttatgcaccaactagaaaaagaaaattccgtggatgtttaccaggtagccaagatgatcaatctgatgaggccaggagtctttgctgacattgagcagtatcagtttctctacaaagtgatcctcagccttgtgagcacaaggcaggaagagaatccatccacctctctggacagtaatggtgcagcattgcctgatggaaatatagctgagagcttagagtctttagtttaa

SEQ ID NO: 339 - DNA, 6924 bp, Artificial sequence
  A novel predicted alternative spliced variant
atgcgaatcctaaagcgtttcctcgcttgcattcagctcctctgtgtttgccgcctggattgggctaatggatactacagacaacagagaaaacttgttgaagagattggctggtcctatacaggagcactgaatcaaaaaaattggggaaagaaatatccaacatgtaatagcccaaaacaatctcctatcaatattgatgaagatcttacacaagtaaatgtgaatcttaagaaacttaaatttcagggttgggataaaacatcattggaaaacacattcattcataacactgggaaaacagtggaaattaatctcactaatgactaccgtgtcagcggaggagtttcagaaatggtgtttaaagcaagcaagataacttttcactggggaaaatgcaatatgtcatctgatggatcagagcatagtttagaaggacaaaaatttccacttgagatgcaaatctactgctttgatgcggaccgattttcaagttttgaggaagcagtcaaaggaaaagggaagttaagagctttatccattttgtttgaggttgggacagaagaaaatttggatttcaaagcgattattgatggagtcgaaagtgttagtcgttttgggaagcaggctgctttagatccattcatactgttgaaccttctgccaaactcaactgacaagtattacatttacaatggctcattgacatctcctccctgcacagacacagttgactggattgtttttaaagatacagttagcatctctgaaagccagttggctgttttttgtgaagttcttacaatgcaacaatctggttatgtcatgctgatggactacttacaaaacaattttcgagagcaacagtacaagttctctagacaggtgttttcctcatacactggaaaggaagagattcatgaagcagtttgtagttcagaaccagaaaatgttcaggctgacccagagaattataccagccttcttgttacatgggaaagacctcgagtcgtttatgataccatgattgagaagtttgcagttttgtaccagcagttggatggagaggaccaaaccaagcatgaatttttgacagatggctatcaagacttgggtgctattctcaataatttgctacccaatatgagttatgttcttcagatagtagccatatgcactaatggcttatatggaaaatacagcgaccaactgattgtcgacatgcctactgataatcctgaacttgatcttttccctgaattaattggaactgaagaaataatcaaggaggaggaagagggaaaagacattgaagaaggcgctattgtgaatcctggtagagacagtgctacaaaccaaatcaggaaaaaggaaccccagatttctaccacaacacactacaatcgcatagggacgaaatacaatgaagccaagactaaccgatccccaacaagaggaagtgaattctctggaaagggtgatgttcccaatacatctttaaattccacttcccaaccagtcactaaattagccacagaaaaagatatttccttgacttctcagactgtgactgaactgccacctcacactgtggaaggtacttcagcctctttaaatgatggctctaaaactgttcttagatctccacatatgaacttgtcggggactgcagaatccttaaatacagtttctataacagaatatgaggaggagagtttattgaccagtttcaagcttgatactggagctgaagattcttcaggctccagtcccgcaacttctgctatcccattcatctctgagaacatatcccaagggtatatattttcctccgaaaacccagagacaataacatatgatgtccttataccagaatctgctagaaatgcttccgaagattcaacttcatcaggttcagaagaatcactaaaggatccttctatggagggaaatgtgtggtttcctagctctacagacataacagcacagcccgatgttggatcaggcagagagagctttctccagactaattacactgagatacgtgttgatgaatctgagaagacaaccaagtccttttctgcaggcccagtgatgtcacagggtccctcagttacagatctggaaatgccacattattctacctttgcctacttcccaactgaggtaacacctcatgcttttaccccatcctccagacaacaggatttggtctccacggtcaacgtggtatactcgcagacaacccaaccggtatacaatggtgagacacctcttcaaccttcctacagtagtgaagtctttcctctagtcacccctttgttgcttgacaatcagatcctcaacactacccctgctgcttcaagtagtgattcggccttgcatgctacgcctgtatttcccagtgtcgatgtgtcatttgaatccatcctgtcttcctatgatggtgcacctttgcttccattttcctctgcttccttcagtagtgaattgtttcgccatctgcatacagtttctcaaatccttccacaagttacttcagctaccgagagtgataaggtgcccttgcatgcttctctgccagtggctgggggtgatttgctattagagcccagccttgctcagtattctgatgtgctgtccactactcatgctgcttcagagacgctggaatttggtagtgaatctggtgttctttataaaacgcttatgttttctcaagttgaaccacccagcagtgatgccatgatgcatgcacgttcttcagggcctgaaccttcttatgccttgtctgataatgagggctcccaacacatcttcactgtttcttacagttctgcaatacctgtgcatgattctgtgggtgtaacttatcagggttccttatttagcggccctagccatataccaatacctaagtcttcgttaataaccccaactgcatcattactgcagcctactcatgccctctctggtgatggggaatggtctggagcctcttctgatagtgaatttcttttacctgacacagatgggctgacagcccttaacatttcttcacctgtttctgtagctgaatttacatatacaacatctgtgtttggtgatgataataaggcgctttctaaaagtgaaataatatatggaaatgagactgaactgcaaattccttctttcaatgagatggtttacccttctgaaagcacagtcatgcccaacatgtatgataatgtaaataagttgaatgcgtctttacaagaaacctctgtttccatttctagcaccaagggcatgtttccagggtcccttgctcataccaccactaaggtttttgatcatgagattagtcaagttccagaaaataacttttcagttcaacctacacatactgtctctcaagcatctggtgacacttcgcttaaacctgtgcttagtgcaaactcagagccagcatcctctgaccctgcttctagtgaaatgttatctccttcaactcagctcttattttatgagacctcagcttcttttagtactgaagtattgctacaaccttcctttcaggcttctgatgttgacaccttgcttaaaactgttcttccagctgtgcccagtgatccaatattggttgaaacccccaaagttgataaaattagttctacaatgttgcatctcattgtatcaaattctgcttcaagtgaaaacatgctgcactctacatctgtaccagtttttgatgtgtcgcctacttctcatatgcactctgcttcacttcaaggtttgaccatttcctatgcaagtgagaaatatgaaccagttttgttaaaaagtgaaagttcccaccaagtggtaccttctttgtacagtaatgatgagttgttccaaacggccaatttggagattaaccaggcccatcccccaaaaggaaggcatgtatttgctacacctgttttatcaattgatgaaccattaaatacactaataaataagcttatacattccgatgaaattttaacctccaccaaaagttctgttactggtaaggtatttgctggtattccaacagttgcttctgatacatttgtatctactgatcattctgttcctataggaaatgggcatgttgccattacagctgtttctccccacagagatggttctgtaacctcaacaaagttgctgtttccttctaaggcaacttctgagctgagtcatagtgccaaatctgatgccggtttagtgggtggtggtgaagatggtgacactgatgatgatggtgatgatgatgatgacagagatagtgatggcttatccattcataagtgtatgtcatgctcatcctatagagaatcacaggaaaaggtaatgaatgattcagacacccacgaaaacagtcttatggatcagaataatccaatctcatactcactatctgagaattctgaagaagataatagagtcacaagtgtatcctcagacagtcaaactggtatggacagaagtcctggtaaatcaccatcagcaaatgggctatcccaaaagcacaatgatggaaaagaggaaaatgacattcagactggtagtgctctgcttcctctcagccctgaatctaaagcatgggcagttctgacaagtgatgaagaaagtggatcagggcaaggtacctcagatagccttaatgagaatgagacttccacagatttcagttttgcagacactaatgaaaaagatgctgatgggatcctggcagcaggtgactcagaaataactcctggattcccacagtccccaacatcatctgttactagcgagaactcagaagtgttccacgtttcagaggcagaggccagtaatagtagccatgagtctcgtattggtctagctgaggggttggaatccgagaagaaggcagttataccccttgtgatcgtgtcagccctgacttttatctgtctagtggttcttgtgggtattctcatctactggaggaaatgcttccagactgcacacttttacttagaggacagtacatcccctagagttatatccacacctccaacacctatctttccaatttcagatgatgtcggagcaattccaataaagcactttccaaagcatgttgcagatttacatgcaagtagtgggtttactgaagaatttgaggaagtgcagagctgtactgttgacttaggtattacagcagacagctccaaccacccagacaacaagcacaagaatcgatacataaatatcgttgcctatgatcatagcagggttaagctagcacagcttgctgaaaaggatggcaaactgactgattatatcaatgccaattatgttgatggctacaacagaccaaaagcttatattgctgcccaaggcccactgaaatccacagctgaagatttctggagaatgatatgggaacataatgtggaagttattgtcatgataacaaacctcgtggagaaaggaaggagaaaatgtgatcagtactggcctgccgatgggagtgaggagtacgggaactttctggtcactcagaagagtgtgcaagtgcttgcctattatactgtgaggaattttactctaagaaacacaaaaataaaaaagggctcccagaaaggaagacccagtggacgtgtggtcacacagtatcactacacgcagtggcctgacatgggagtaccagagtactccctgccagtgctgacctttgtgagaaaggcagcctatgccaagcgccatgcagtggggcctgttgtcgtccactgcagtgctggagttggaagaacaggcacatatattgtgctagacagtatgttgcagcagattcaacacgaaggaactgtcaacatatttggcttcttaaaacacatccgttcacaaagaaattatttggtacaaactgaggagcaatatgtcttcattcatgatacactggttgaggccatacttagtaaagaaactgaggtgctggacagtcatattcatgcctatgttaatgcactcctcattcctggaccagcaggcaaaacaaagctagagaaacaattccagctcctgagccagtcaaatatacagcagagtgactattctgcagccctaaagcaatgcaacagggaaaagaatcgaacttcttctatcatccctgtggaaagatcaagggttggcatttcatccctgagtggagaaggcacagactacatcaatgcctcctatatcatgggctattaccagagcaatgaattcatcattacccagcaccctctccttcataccatcaaggatttctggaggatgatatgggaccataatgcccaactggtggttatgattcctgatggccaaaacatggcagaagatgaatttgtttactggccaaataaagatgagcctataaattgtgagagctttaaggtcactcttatggctgaagaacacaaatgtctatctaatgaggaaaaacttataattcaggactttatcttagaagctacacaggatgattatgtacttgaagtgaggcactttcagtgtcctaaatggccaaatccagatagccccattagtaaaacttttgaacttataagtgttataaaagaagaagctgccaatagggatgggcctatgattgttcatgatgagcatggaggagtgacggcaggaactttctgtgctctgacaacccttatgcaccaactagaaaaagaaaattccgtggatgtttaccaggtagccaagatgatcaatctgatgaggccaggagtctttgctgacattgagcagtatcagtttctctacaaagtgatcctcagccttgtgagcacaaggcaggaagagaatccatccacctctctggacagtaatggtgcagcattgcctgatggaaatatagctgagagcttagagtctttagtttaa

SEQ ID NO: 340 - DNA, 6809 bp, Artificial sequence
  A novel predicted alternative spliced variant
atgcgaatcctaaagcgtttcctcgcttgcattcagctcctctgtgtttgccgcctggattgggctaatggatactacagacaacagagaaaacttgttgaagagattggctggtcctatacaggagcactgaatcaaaaaaattggggaaagaaatatccaacatgtaatagcccaaaacaatctcctatcaatattgatgaagatcttacacaagtaaatgtgaatcttaagaaacttaaatttcagggttgggataaaacatcattggaaaacacattcattcataacactgggaaaacagtggaaattaatctcactaatgactaccgtgtcagcggaggagtttcagaaatggtgtttaaagcaagcaagataacttttcactggggaaaatgcaatatgtcatctgatggatcagagcatagtttagaaggacaaaaatttccacttgagatgcaaatctactgctttgatgcggaccgattttcaagttttgaggaagcagtcaaaggaaaagggaagttaagagctttatccattttgtttgaggttgggacagaagaaaatttggatttcaaagcgattattgatggagtcgaaagtgttagtcgttttgggaagcaggctgctttagatccattcatactgttgaaccttctgccaaactcaactgacaagtattacatttacaatggctcattgacatctcctccctgcacagacacagttgactggattgtttttaaagatacagttagcatctctgaaagccagttggctgttttttgtgaagttcttacaatgcaacaatctggttatgtcatgctgatggactacttacaaaacaattttcgagagcaacagtacaagttctctagacaggtgttttcctcatacactggaaaggaagagattcatgaagcagtttgtagttcagaaccagaaaatgttcaggctgacccagagaattataccagccttcttgttacatgggaaagacctcgagtcgtttatgataccatgattgagaagtttgcagttttgtaccagcagttggatggagaggaccaaaccaagcatgaatttttgacagatggctatcaagacttgggtgctattctcaataatttgctacccaatatgagttatgttcttcagatagtagccatatgcactaatggcttatatggaaaatacagcgaccaactgattgtcgacatgcctactgataatcctgaacttgatcttttccctgaattaattggaactgaagaaataatcaaggaggaggaagagggaaaagacattgaagaaggcgctattgtgaatcctggtagagacagtgctacaaaccaaatcaggaaaaaggaaccccagatttctaccacaacacactacaatcgcatagggacgaaatacaatgaagccaagactaaccgatccccaacaagaggaagtgaattctctggaaagggtgatgttcccaatacatctttaaattccacttcccaaccagtcactaaattagccacagaaaaagatatttccttgacttctcagactgtgactgaactgccacctcacactgtggaaggtacttcagcctctttaaatgatggctctaaaactgttcttagatctccacatatgaacttgtcggggactgcagaatccttaaatacagtttctataacagaatatgaggaggagagtttattgaccagtttcaagcttgatactggagctgaagattcttcaggctccagtcccgcaacttctgctatcccattcatctctgagaacatatcccaagggtatatattttcctccgaaaacccagagacaataacatatgatgtccttataccagaatctgctagaaatgcttccgaagattcaacttcatcaggttcagaagaatcactaaaggatccttctatggagggaaatgtgtggtttcctagctctacagacataacagcacagcccgatgttggatcaggcagagagagctttctccagactaattacactgagatacgtgttgatgaatctgagaagacaaccaagtccttttctgcaggcccagtgatgtcacagggtccctcagttacagatctggaaatgccacattattctacctttgcctacttcccaactgaggtaacacctcatgcttttaccccatcctccagacaacaggatttggtctccacggtcaacgtggtatactcgcagacaacccaaccggtatacaatggtgagacacctcttcaaccttcctacagtagtgaagtctttcctctagtcacccctttgttgcttgacaatcagatcctcaacactacccctgctgcttcaagtagtgattcggccttgcatgctacgcctgtatttcccagtgtcgatgtgtcatttgaatccatcctgtcttcctatgatggtgcacctttgcttccattttcctctgcttccttcagtagtgaattgtttcgccatctgcatacagtttctcaaatccttccacaagttacttcagctaccgagagtgataaggtgcccttgcatgcttctctgccagtggctgggggtgatttgctattagagcccagccttgctcagtattctgatgtgctgtccactactcatgctgcttcagagacgctggaatttggtagtgaatctggtgttctttataaaacgcttatgttttctcaagttgaaccacccagcagtgatgccatgatgcatgcacgttcttcagggcctgaaccttcttatgccttgtctgataatgagggctcccaacacatcttcactgtttcttacagttctgcaatacctgtgcatgattctgtgggtgtaacttatcagggttccttatttagcggccctagccatataccaatacctaagtcttcgttaataaccccaactgcatcattactgcagcctactcatgccctctctggtgatggggaatggtctggagcctcttctgatagtgaatttcttttacctgacacagatgggctgacagcccttaacatttcttcacctgtttctgtagctgaatttacatatacaacatctgtgtttggtgatgataataaggcgctttctaaaagtgaaataatatatggaaatgagactgaactgcaaattccttctttcaatgagatggtttacccttctgaaagcacagtcatgcccaacatgtatgataatgtaaataagttgaatgcgtctttacaagaaacctctgtttccatttctagcaccaagggcatgtttccagggtcccttgctcataccaccactaaggtttttgatcatgagattagtcaagttccagaaaataacttttcagttcaacctacacatactgtctctcaagcatctggtgacacttcgcttaaacctgtgcttagtgcaaactcagagccagcatcctctgaccctgcttctagtgaaatgttatctccttcaactcagctcttattttatgagacctcagcttcttttagtactgaagtattgctacaaccttcctttcaggcttctgatgttgacaccttgcttaaaactgttcttccagctgtgcccagtgatccaatattggttgaaacccccaaagttgataaaattagttctacaatgttgcatctcattgtatcaaattctgcttcaagtgaaaacatgctgcactctacatctgtaccagtttttgatgtgtcgcctacttctcatatgcactctgcttcacttcaaggtttgaccatttcctatgcaagtgagaaatatgaaccagttttgttaaaaagtgaaagttcccaccaagtggtaccttctttgtacagtaatgatgagttgttccaaacggccaatttggagattaaccaggcccatcccccaaaaggaaggcatgtatttgctacacctgttttatcaattgatgaaccattaaatacactaataaataagcttatacattccgatgaaattttaacctccaccaaaagttctgttactggtaaggtatttgctggtattccaacagttgcttctgatacatttgtatctactgatcattctgttcctataggaaatgggcatgttgccattacagctgtttctccccacagagatggttctgtaacctcaacaaagttgctgtttccttctaaggcaacttctgagctgagtcatagtgccaaatctgatgccggtttagtgggtggtggtgaagatggtgacactgatgatgatggtgatgatgatgatgacagagatagtgatggcttatccattcataagtgtatgtcatgctcatcctatagagaatcacaggaaaaggtaatgaatgattcagacacccacgaaaacagtcttatggatcagaataatccaatctcatactcactatctgagaattctgaagaagataatagagtcacaagtgtatcctcagacagtcaaactggtatggacagaagtcctggtaaatcaccatcagcaaatgggctatcccaaaagcacaatgatggaaaagaggaaaatgacattcagactggtagtgctctgcttcctctcagccctgaatctaaagcatgggcagttctgacaagtgatgaagaaagtggatcagggcaaggtacctcagatagccttaatgagaatgagacttccacagatttcagttttgcagacactaatgaaaaagatgctgatgggatcctggcagcaggtgactcagaaataactcctggattcccacagtccccaacatcatctgttactagcgagaactcagaagtgttccacgtttcagaggcagaggccagtaatagtagccatgagtctcgtattggtctagctgaggggttggaatccgagaagaaggcagttataccccttgtgatcgtgtcagccctgacttttatctgtctagtggttcttgtgggtattctcatctactggaggaaatgcttccagactgcacacttttacttagaggacagtacatcccctagagttatatccacacctccaacacctatctttccaatttcagatgatgtcggagcaattccaataaagcactttccaaagcatgttgcagatttacatgcaagtagtgggtttactgaagaatttgagacactgaaagagttttaccaggaagtgcagagctgtactgttgacttaggtattacagcagacagctccaaccacccagacaacaagcacaagaatcgatacataaatatcgttgcctatgatcatagcagggttaagctagcacagcttgctgaaaaggatggcaaactgactgattatatcaatgccaattatgttgatggctacaacagaccaaaagcttatattgctgcccaaggcccactgaaatccacagctgaagatttctggagaatgatatgggaacataatgtggaagttattgtcatgataacaaacctcgtggagaaaggaaggagaaaatgtgatcagtactggcctgccgatgggagtgaggagtacgggaactttctggtcactcagaagagtgtgcaagtgcttgcctattatactgtgaggaattttactctaagaaacacaaaaataaaaaagggctcccagaaaggaagacccagtggacgtgtggtcacacagtatcactacacgcagtggcctgacatgggagtaccagagtactccctgccagtgctgacctttgtgagaaaggcagcctatgccaagcgccatgcagtggggcctgttgtcgtccactgcaggagcaatatgtcttcattcatgatacactggttgaggccatacttagtaaagaaactgaggtgctggacagtcatattcatgcctatgttaatgcactcctcattcctggaccagcaggcaaaacaaagctagagaaacaattccagctcctgagccagtcaaatatacagcagagtgactattctgcagccctaaagcaatgcaacagggaaaagaatcgaacttcttctatcatccctgtggaaagatcaagggttggcatttcatccctgagtggagaaggcacagactacatcaatgcctcctatatcatgggctattaccagagcaatgaattcatcattacccagcaccctctccttcataccatcaaggatttctggaggatgatatgggaccataatgcccaactggtggttatgattcctgatggccaaaacatggcagaagatgaatttgtttactggccaaataaagatgagcctataaattgtgagagctttaaggtcactcttatggctgaagaacacaaatgtctatctaatgaggaaaaacttataattcaggactttatcttagaagctacacaggatgattatgtacttgaagtgaggcactttcagtgtcctaaatggccaaatccagatagccccattagtaaaacttttgaacttataagtgttataaaagaagaagctgccaatagggatgggcctatgattgttcatgatgagcatggaggagtgacggcaggaactttctgtgctctgacaacccttatgcaccaactagaaaaagaaaattccgtggatgtttaccaggtagccaagatgatcaatctgatgaggccaggagtctttgctgacattgagcagtatcagtttctctacaaagtgatcctcagccttgtgagcacaaggcaggaagagaatccatccacctctctggacagtaatggtgcagcattgcctgatggaaatatagctgagagcttagagtctttagtttaa

SEQ ID NO: 341 - DNA, 5917 bp, Artificial sequence
  A novel predicted alternative spliced variant
atgctgagccatggagccgggttggccttgtggatcacactgagcctgctgcagactggactggcggagccagagagatgtaacttcaccctggcggagtccaaggcctccagccattctgtgtctatccagtggagaattttgggctcaccctgtaactttagcctcatctatagcagtgacaccctgggggccgcgttgtgccctacctttcggatagacaacaccacatacggatgtaaccttcaagatttacaagcaggaaccatctataacttcaagattatttctctggatgaagagagaactgtggtcttgcaaacagatcctttacctcctgctaggtttggagtcagtaaagagaagacgacttcaaccggcttgcatgtttggtggactccttcttccggaaaagtcacctcatatgaggtgcaattatttgatgaaaataaccaaaagatacagggggttcaaattcaagaaagtacttcatggaatgaatacacttttttcaatctcactgctggtagtaaatacaatattgccatcacagctgtttctggaggaaaacgttctttttcagtttataccaatggatcaacagtgccatctccagtgaaagatattggtatttccacaaaagccaattctctcctgatttcctggtcccatggttctgggaatgtggaacgataccggctgatgctaatggataaagggatcctagttcatggcggtgttgtggacaaacatgctacttcctatgcttttcacgggctgtcccctggctacctctacaacctcactgttatgactgaggctgcagggctgcaaaactacaggtggaaactagtcaggacagcccccatggaagtctcaaatctgaaggtgacaaatgatggcagtttgacctctctaaaagtcaaatggcaaagacctcctggaaatgtggattcttacaatatcaccctgtctcacaaagggaccatcaaggaatccagagtattagcaccttggattactgaaactcactttaaagagttagtccccggtcgactttatcaagttactgtcagctgtgtctctggtgaactgtctgctcagaagatggcagtgggcagaacatttccagacaaagttgcaaacctggaggcaaacaataatggcaggatgaggtctcttgtagtgagctggtcgccccctgctggagactgggagcagtatcggatcctactcttcaatgattctgtggtgctgctcaacatcactgtgggaaaggaagaaacacagtatgtcatggatgacacggggctcgtaccgggaagacagtatgaggtggaagtcattgttgagagtggaaatttgaagaattctgagcgttgccaaggcaggacagtccccctggctgtcctccagcttcgtgtcaaacatgccaatgaaacctcactgagtatcatgtggcagacccctgtagcagaatgggagaaatacatcatttccctagctgacagagacctcttactgatccacaagtcactctccaaagatgccaaagaattcacttttactgacctggtgcctggacgaaaatacatggctacagtcaccagtattagtggagacttaaaaaattcctcttcagtaaaaggaagaacagtgcctgcccaagtgactgacttgcatgtggccaaccaaggaatgaccagtagtctgtttactaactggacccaggcacaaggagacgtagaattttaccaagtcttactgatccatgaaaatgtggtcattaaaaatgaaagcatctccagtgagaccagcagatacagcttccactctctcaagtccggcagcctgtactccgtggtggtaacaacagtgagtggagggatctcttcccgacaagtggttgtggagggaagaacagtcccttccagtgtgagtggagtaacggtgaacaattccggtcgtaatgactacctcagcgtttcctggctgctggcgcccggagatgtggataactatgaggtaacattgtctcatgacggcaaggtggttcagtcccttgtcattgccaagtctgtcagagaatgttccttcagctccctcaccccaggccgcctctacaccgtgaccataactacaaggagtggcaagtatgaaaatcactccttcagccaagagcggacagtgcctgacaaagtccagggagtcagtgttagcaactcagccaggagtgactatttaagggtatcctgggtgcatgccactggagactttgatcactatgaagtcaccattaaaaacaaaaacaacttcattcaaactaaaagcattcccaagtcagaaaacgaatgtgtatttgttcagctagtccctggacggttgtacagtgtcactgttactacaaaaagtggacaatatgaagccaatgaacaagggaatgggagaacaattccagagcctgttaaggatctaacattgcgcaacaggagcactgaggacttgcatgtgacttggtcaggagctaatggggatgtcgaccaatatgagatccagctgctcttcaatgacatgaaagtatttcctccttttcaccttgtaaataccgcaaccgagtatcgatttacttccctaacaccaggccgccaatacaaaattcttgtcttgacgattagcggggatgtacagcagtcagccttcattgagggcttcacagttcctagtgctgtcaaaaatattcacatttctcccaatggagcaacagatagcctgacggtgaactggactcctggtgggggagacgttgattcctacacggtgtcggcattcaggcacagtcaaaaggttgactctcagactattcccaagcacgtctttgagcacacgttccacagactggaggccggggagcagtaccagatcatgattgcctcagtcagcgggtccctgaagaatcagataaatgtggttgggcggacagttccagcatctgtccaaggagtaattgcagacaatgcatacagcagttattccttaatagtaagttggcaaaaagctgctggtgtggcagaaagatatgatatcctgcttctaactgaaaatggaatccttctgcgcaacacatcagagccagccaccactaagcaacacaaatttgaagatctaacaccaggcaagaaatacaagatacagatcctaactgtcagtggaggcctctttagcaaggaagcccagactgaaggccgaacagtcccagcagctgtcaccgacctgaggatcacagagaactccaccaggcacctgtccttccgctggaccgcctcagagggggagctcagctggtacaacatctttttgtacaacccagatgggaatctccaggagagagctcaagttgacccactagtccagagcttctctttccagaacttgctacaaggcagaatgtacaagatggtgattgtaactcacagtggggagctgtctaatgagtctttcatatttggtagaacagtcccagcctctgtgagtcatctcagggggtccaatcggaacacgacagacagcctttggttcaactggagtccagcctctggggactttgacttttatgagctgattctctataatcccaatggcacaaagaaggaaaactggaaagacaaggacctgacggagtggcggtttcaaggccttgttcctggaaggaagtacgtgctgtgggtggtaactcacagtggagatctcagcaataaagtcacagcggagagcagaacagctccaagtcctcccagtcttatgtcatttgctgacattgcaaacacatccttggccatcacgtggaaagggcccccagactggacagactacaacgactttgagctgcagtggttgcccagagatgcacttactgtcttcaacccctacaacaacagaaaatcagaaggacgcattgtgtatggtcttcgtccagggagatcctatcaattcaacgtcaagactgtcagtggtgattcctggaaaacttacagcaaaccaatttttggatctgtgaggacaaagcctgacaagatacaaaacctgcattgccggcctcagaactccacggccattgcctgttcttggatccctcctgattctgactttgatggttatagtattgaatgccggaaaatggacacccaagaagttgagttttccagaaagctggagaaagaaaaatctctgctcaacatcatgatgctagtgccccataagaggtacctggtgtccatcaaagtgcagtcggccggcatgaccagcgaggtggttgaagacagcactatcacaatgatagaccgcccccctcctccacccccacacattcgtgtgaatgaaaaggatgtgctaattagcaagtcttccatcaactttactgtcaactgcagctggttcagcgacaccaatggagctgtgaaatacttcacagtggtggtgagagaggctgatggcagtgatgagctgaagccagaacagcagcaccctctcccttcctacctggagtacaggcacaatgcctccattcgggtgtatcagactaattattttgccagcaaatgtgccgaaaatcctaacagcaactccaagagttttaacattaagcttggagcagagatggagagcttaggtggaaaacgcgatcccactcagcaaaaattctgtgatggaccactgaagccacacactgcctacagaatcagcattcgagcttttacacagctctttgatgaggacctgaaggaattcacaaagccactctattcagacacatttttttctttacccatcactactgaatcagagcccttgtttggagctattgaaggtgtgagtgctggtctgtttttaattggcatgctagtggctgttgttgccttattgatctgcagacagaaagtgagccatggtcgagaaagaccctctgcccgtctgagcattcgtagggatcgaccattatctgtccacttaaacctgggccagaaaggtaaccggaaaacttcttgtccaataaaaataaatcagtttgaagggcatttcatgaagctacaggctgactccaactaccttctatccaaggaatacgaggagttaaaagacgtgggccgaaaccagtcatgtgacattgcactcttgccggagaatagagggaaaaatcgatacaacaatatattgccctggcaacaacttcagaagagaatacattgtcactcagggaccgcttcctggcaccaaggatgacttctggaaaatggtgtgggaacaaaacgttcacaacatcgtcatggtgacccagtgtgttgagaagggccgagtaaagtgtgaccattactggccagcggaccaggattccctctactatggggacctcatcctgcagatgctctcagagtccgtcctgcctgagtggaccatccgggagtttaagatatgcggtgaggaacagcttgatgcacacagactcatccgccactttcactatacggtgtggccagaccatggagtcccagaaaccacccagtctctgatccagtttgtgagaactgtcagggactacatcaacagaagcccgggtgctgggcccactgtggtgcactgcagtgctggtgtgggtaggactggaacctttattgcattggaccgaatcctccagcagttagactccaaagactctgtggacatttatggagcagtgcacgacctaagacttcacagggttcacatggtccagactgagtgtcagtatgtctacctacatcagtgtgtaagagatgtcctcagagcaagaaagctacggagtgaacaagaaaaccccttgtttccaatctatgaaaatgtgaatccagagtatcacagagatccagtctattcaaggcattga

SEQ ID NO: 342 - DNA, 749 bp, Artificial sequence
  A novel predicted alternative spliced variant
atgaagaagacacaaacttggattctcacttgcatttatcttcagctgctcctatttaatcctctcgtcaaaactgaagggatctgcaggaatcgtgtgactaataatgtaaaagacgtcactaaattggtggcaaatcttccaaaagactacatgataaccctcaaatatgtccccgggatggatgttttgccaagtcattgttggataagcgagatggtagtacaattgtcagacagcttgactgatcttctggacaagttttcaaatatttctgaaggcttgagtaattattccatcatagacaaacttgtgaatatagtcgatgaccttgtggagtgcgtcaaagaaaactcatctaaggatctaaaaaaatcattcaagagcccagaacccaggctctttactcctgaagaattctttagaatttttaatagatccattgatgccttcaaggactttgtagtggcatctgaaactagtgattgtgtggtttcttcaacattaagtcctgagaaagattccagagtcagtgtcacaaaaccatttatgttaccccctgttgcagccagctcccttaggaatgacagcagtagcagtaataggaaggccaaaaatccccctggagactccagcctacactgggcagccatggcattgccagcattgttttctcttataattggctttgcttttggagccttatactggaagtatgttgcaagagaaagagagagagtttcaagaag

SEQ ID NO: 343 - DNA, 2816 bp, Artificial sequence
  A novel predicted alternative spliced variant
atgagaggcgctcgcggcgcctgggattttctctgcgttctgctcctactgcttcgcgtccagacaggctcttctcaaccatctgtgagtccaggggaaccgtctccaccatccatccatccaggaaaatcagacttaatagtccgcgtgggcgacgagattaggctgttatgcactgatccgggctttgtcaaatggacttttgagatcctggatgaaacgaatgagaataagcagaatgaatggatcacggaaaaggcagaagccaccaacaccggcaaatacacgtgcaccaacaaacacggcttaagcaattccatttatgtgtttgttagagatcctgccaagcttttccttgttgaccgctccttgtatgggaaagaagacaacgacacgctggtccgctgtcctctcacagacccagaagtgaccaattattccctcaaggggtgccaggggaagcctcttcccaaggacttgaggtttattcctgaccccaaggcgggcatcatgatcaaaagtgtgaaacgcgcctaccatcggctctgtctgcattgttctgtggaccaggagggcaagtcagtgctgtcggaaaaattcatcctgaaagtgaggccagccttcaaagctgtgcctgttgtgtctgtgtccaaagcaagctatcttcttagggaaggggaagaattcacagtgacgtgcacaataaaagatgtgtctagttctgtgtactcaacgtggaaaagagaaaacagtcagactaaactacaggagaaatataatagctggcatcacggtgacttcaattatgaacgtcaggcaacgttgactatcagttcagcgagagttaatgattctggagtgttcatgtgttatgccaataatacttttggatcagcaaatgtcacaacaaccttggaagtagtagataaaggattcattaatatcttccccatgataaacactacagtatttgtaaacgatggagaaaatgtagatttgattgttgaatatgaagcattccccaaacctgaacaccagcagtggatctatatgaacagaaccttcactgataaatgggaagattatcccaagtctgagaatgaaagtaatatcagatacgtaagtgaacttcatctaacgagattaaaaggcaccgaaggaggcacttacacattcctagtgtccaattctgacgtcaatgctgccatagcatttaatgtttatgtgaataatgctctgcttctgtactgccagtggatgtgcagacactaaactcatctgggccaccgtttggaaagctagtggttcagagttctatagattctagtgcattcaagcacaatggcacggttgaatgtaaggcttacaacgatgtgggcaagacttctgcctattttaactttgcatttaaaggtaacaacaaagagcaaatccatccccacaccctgttcactcctttgctgattggtttcgtaatcgtagctggcatgatgtgcattattgtgatgattctgacctacaaatatttacagaaacccatgtatgaagtacagtggaaggttgttgaggagataaatggaaacaattatgtttacatagacccaacacaacttccttatgatcacaaatgggagtttcccagaaacaggctgagttttgggaaaaccctgggtgctggagctttcgggaaggttgttgaggcaactgcttatggcttaattaagtcagatgcggccatgactgtcgctgtaaagatgctcaagccgagtgcccatttgacagaacgggaagccctcatgtctgaactcaaagtcctgagttaccttggtaatcacatgaatattgtgaatctacttggagcctgcaccattggagggcccaccctggtcattacagaatattgttgctatggtgatcttttgaattttttgagaagaaaacgtgattcatttatttgttcaaagcaggaagatcatgcagaagctgcactttataagaatcttctgcattcaaaggagtcttcctgcagcgatagtactaatgagtacatggacatgaaacctggagtttcttatgttgtcccaaccaaggccgacaaaaggagatctgtgagaataggctcatacatagaaagagatgtgactcccgccatcatggaggatgacgagttggccctagacttagaagacttgctgagcttttcttaccaggtggcaaagggcatggctttcctcgcctccaagaattgtattcacagagacttggcagccagaaatatcctccttactcatggtcggatcacaaagatttgtgattttggtctagccagagacatcaagaatgattctaattatgtggttaaaggaaacgctcgactacctgtgaagtggatggcacctgaaagcattttcaactgtgtatacacgtttgaaagtgacgtctggtcctatgggatttttctttgggagctgttctctttaggaagcagcccctatcctggaatgccggtcgattctaagttctacaagatgatcaaggaaggcttccggatgctcagccctgaacacgcacctgctgaaatgtatgacataatgaagacttgctgggatgcagatcccctaaaaagaccaacattcaagcaaattgttcagctaattgagaagcagatttcagagagcaccaatcatatttactccaacttagcaaactgcagccccaaccgacagaagcccgtggtagaccattctgtgcggatcaattctgtcggcagcaccgcttcctcctcccagcctctgcttgtgcacgacgatgtctga

SEQ ID NO: 344 - DNA, 2780 bp, Artificial sequence
  A novel predicted alternative spliced variant
atgagaggcgctcgcggcgcctgggattttctctgcgttctgctcctactgcttcgcgtccagacaggctcttctcaaccatctgtgagtccaggggaaccgtctccaccatccatccatccaggaaaatcagacttaatagtccgcgtgggcgacgagattaggctgttatgcactgatccgggctttgtcaaatggacttttgagatcctggatgaaacgaatgagaataagcagaatgaatggatcacggaaaaggcagaagccaccaacaccggcaaatacacgtgcaccaacaaacacggcttaagcaattccatttatgtgtttgttagagatcctgccaagcttttccttgttgaccgctccttgtatgggaaagaagacaacgacacgctggtccgctgtcctctcacagacccagaagtgaccaattattccctcaaggggtgccaggggaagcctcttcccaaggacttgaggtttattcctgaccccaaggcgggcatcatgatcaaaagtgtgaaacgcgcctaccatcggctctgtctgcattgttctgtggaccaggagggcaagtcagtgctgtcggaaaaattcatcctgaaagtgaggccagccttcaaagctgtgcctgttgtgtctgtgtccaaagcaagctatcttcttagggaaggggaagaattcacagtgacgtgcacaataaaagatgtgtctagttctgtgtactcaacgtggaaaagagaaaacagtcagactaaactacaggagaaatataatagctggcatcacggtgacttcaattatgaacgtcaggcaacgttgactatcagttcagcgagagttaatgattctggagtgttcatgtgttatgccaataatacttttggatcagcaaatgtcacaacaaccttggaagtagtagataaaggattcattaatatcttccccatgataaacactacagtatttgtaaacgatggagaaaatgtagatttgattgttgaatatgaagcattccccaaacctgaacaccagcagtggatctatatgaacagaaccttcactgataaatgggaagattatcccaagtctgagaatgaaagtaatatcagatacgtaagtgaacttcatctaacgagattaaaaggcaccgaaggaggcacttacacattcctagtgtccaattctgacgtcaatgctgccatagcatttaatgtttatgtgaatacaaaaccagaaatcctgacttacgacaggctcgtgaatggcatgctccaatgtgtggcagcaggattcccagagcccacaatagattggtatttttgtccaggaactgagcagagatgctctgcttctgtactgccagtggatgtgcagacactaaactcatctgggccaccgtttggaaagctagtggttcagagttctatagattctagtgcattcaagcacaatggcacggttgaatgtaaggcttacaacgatgtgggcaagacttctgcctattttaactttgcatttaaaggtaacaacaaagagcaaatccatccccacaccctgttcactcctttgctgattggtttcgtaatcgtagctggcatgatgtgcattattgtgatgattctgacctacaaatatttacagaaacccatgtatgaagtacagtggaaggttgttgaggagataaatggaaacaattatgtttacatagacccaacacaacttccttatgatcacaaatgggagtttcccagaaacaggctgagttttgggaaaaccctgggtgctggagctttcgggaaggttgttgaggcaactgcttatggcttaattaagtcagatgcggccatgactgtcgctgtaaagatgctcaagccgagtgcccatttgacagaacgggaagccctcatgtctgaactcaaagtcctgagttaccttggtaatcacatgaatattgtgaatctacttggagcctgcaccattggagcagcgatagtactaatgagtacatggacatgaaacctggagtttcttatgttgtcccaaccaaggccgacaaaaggagatctgtgagaataggctcatacatagaaagagatgtgactcccgccatcatggaggatgacgagttggccctagacttagaagacttgctgagcttttcttaccaggtggcaaagggcatggctttcctcgcctccaagaattgtattcacagagacttggcagccagaaatatcctccttactcatggtcggatcacaaagatttgtgattttggtctagccagagacatcaagaatgattctaattatgtggttaaaggaaacgctcgactacctgtgaagtggatggcacctgaaagcattttcaactgtgtatacacgtttgaaagtgacgtctggtcctatgggatttttctttgggagctgttctctttaggaagcagcccctatcctggaatgccggtcgattctaagttctacaagatgatcaaggaaggcttccggatgctcagccctgaacacgcacctgctgaaatgtatgacataatgaagacttgctgggatgcagatcccctaaaaagaccaacattcaagcaaattgttcagctaattgagaagcagatttcagagagcaccaatcatatttactccaacttagcaaactgcagccccaaccgacagaagcccgtggtagaccattctgtgcggatcaattctgtcggcagcaccgcttcctcctcccagcctctgcttgtgcacgacgatgtctga

SEQ ID NO: 345 - DNA, 3652 bp, Artificial sequence
  A novel predicted alternative spliced variant
atggagctggcggccttgtgccgctgggggctcctcctcgccctcttgccccccggagccgcgagcacccaagtgtgcaccggcacagacatgaagctgcggctccctgccagtcccgagacccacctggacatgctccgccacctctaccagggctgccaggtggtgcagggaaacctggaactcacctacctgcccaccaatgccagcctgtccttcctgcaggatatccaggaggtgcagggctacgtgctcatcgctcacaaccaagtgaggcaggtcccactgcagaggctgcggattgtgcgaggcacccagctctttgaggacaactatgccctggccgtgctagacaatggagacccgctgaacaataccacccctgtcacaggggcctccccaggaggcctgcgggagctgcagcttcgaagcctcacagagatcttgaaaggaggggtcttgatccagcggaacccccagctctgctaccaggacacgattttgtggaaggacatcttccacaagaacaaccagctggctctcacactgatagacaccaaccgctctcgggcctgccacccctgttctccgatgtgtaagggctcccgctgctggggagagagttctgaggattgtcagagccgcctgcctccacttcaaccacagtggcatctgtgagctgcactgcccagccctggtcacctacaacacagacacgtttgagtccatgcccaatcccgagggccggtatacattcggcgccagctgtgtgactgcctgtccctacaactacctttctacggacgtgggatcctgcaccctcgtctgccccctgcacaaccaagaggtgacagcagaggatggaacacagcggtgtgagaagtgcagcaagccctgtgcccgagtgtgctatggtctgggcatggagcacttgcgagaggtgagggcagttaccagtgccaatatccaggagtttgctggctgcaagaagatctttgggagcctggcatttctgccggagagctttgatggggacccagcctccaacactgccccgctccagccagagcagctccaagtgtttgagactctggaagagatcacaggttacctatacatctcagcatggccggacagcctgcctgacctcagcgtcttccagaacctgcaagtaatccggggacgaattctgcacaatggcgcctactcgctgaccctgcaagggctgggcatcagctggctggggctgcgctcactgagggaactgggcagtggactggccctcatccaccataacacccacctctgcttcgtgcacacggtgccctgggaccagctctttcggaacccgcaccaagctctgctccacactgccaaccggccagaggacgagtgtgtgggcgagggcctggcctgccaccagctgtgcgcccgagggcactgctggggtccagggcccacccagtgtgtcaactgcagccagttccttcggggccaggagtgcgtggaggaatgccgagtactgcaggggctccccagggagtatgtgaatgccaggcactgtttgccgtgccaccctgagtgtcagccccagaatggctcagtgacctgttttggaccggaggctgaccagtgtgtggcctgtgcccactataaggaccctcccttctgcgtggcccgctgccccagcggtgtgaaacctgacctctcctacatgcccatctggaagtttccagatgaggagggcgcatgccagccttgccccatcaactgcacccactcctgtgtggacctggatgacaagggctgccccgccgagcagagagccagccctctgacgtccatcgtctctgcggtggttggcattctgctggtcgtggtcttgggggtggtctttgggatcctcatcaagcgacggcagcagaagatccggaagtacacgatgcggagactgctgcaggaaacggagctggtggagccgctgacacctagcggagcgatgcccaaccaggcgcagatgcggatcctgaaagagacggagctgaggaaggtgaaggtgcttggatctggcgcttttggcacagtctacaagggcatctggatccctgatggggagaatgtgaaaattccagtggccatcaaagtgttgagggaaaacacatcccccaaagccaacaaagaaatcttagacgaagcatacgtgatggctggtgtgggctccccatatgtctcccgccttctgggcatctgcctgacatccacggtgcagctggtgacacagcttatgccctatggctgcctcttagaccatgtccgggaaaaccgcggacgcctgggctcccaggacctgctgaactggtgtatgcagattgccaaggggatgagctacctggaggatgtgcggctcgtacacagggacttggccgctcggaacgtgctggtcaagagtcccaaccatgtcaaaattacagacttcgggctggctcggctgctggacattgacgagacagagtaccatgcagatgggggcaaggtgcccatcaagtggatggcgctggagtccattctccgccggcggttcacccaccagagtgatgtgtggagttatggtgtgactgtgtgggagctgatgacttttggggccaaaccttacgatgggatcccagcccgggagatccctgacctgctggaaaagggggagcggctgccccagccccccatctgcaccattgatgtctacatgatcatggtcaaatgttggatgattgactctgaatgtcggccaagattccgggagttggtgtctgaattctcccgcatggccagggacccccagcgctttgtggtcatccagaatgaggacttgggcccagccagtcccttggacagcaccttctaccgctcactgctggaggacgatgacatgggggacctggtggatgctgaggagtatctggtaccccagcagggcttcttctgtccagaccctgccccgggcgctgggggcatggtccaccacaggcaccgcagctcatctaccaggagtggcggtggggacctgacactagggctggagccctctgaagaggaggcccccaggtctccactggcaccctccgaaggggctggctccgatgtatttgatggtgacctgggaatgggggcagccaaggggctgcaaagcctccccacacatgaccccagccctctacagcggtacagtgaggaccccacagtacccctgccctctgagactgatggctacgttgcccccctgacctgcagcccccagcctgaatatgtgaaccagccagatgttcggccccagcccccttcgccccgagagggccctctgcctgctgcccgacctgctggtgccactctggaaagggccaagactctctccccagggaagaatggggtcgtcaaagacgtttttgcctttgggggtgccgtggagaaccccgagtacttgacaccccagggaggagctgcccctcagccccaccctcctcctgccttcagcccagccttcgacaacctctattactgggaccaggacccaccagagcggggggctccacccagcaccttcaaagggacacctacggcagagaacccagagtacctgggtctggacgtgccagtgtga

SEQ ID NO: 346 - DNA, 3903 bp, Artificial sequence
  A novel predicted alternative spliced variant
atgagggcgaacgacgctctgcaggtgctgggcttgcttttcagcctggcccggggctccgaggtgggcaactctcaggcagtgtgtcctgggactctgaatggcctgagtgtgaccggcgatgctgagaaccaataccagacactgtacaagctctacgagaggtgtgaggtggtgatggggaaccttgagattgtgctcacgggacacaatgccgacctctccttcctgcagtggattcgagaagtgacaggctatgtcctcgtggccatgaatgaattctctactctaccattgcccaacctccgcgtggtgcgagggacccaggtctacgatgggaagtttgccatcttcgtcatgttgaactataacaccaactccagccacgctctgcgccagctccgcttgactcagctcaccggtcccccctgtcatgaggtttgcaaggggcgatgctggggtcctggatcagaagactgccagacattgaccaagaccatctgtgctcctcagtgtaatggtcactgctttgggcccaaccccaaccagtgctgccatgatgagtgtgccgggggctgctcaggccctcaggacacagactgctttgcctgccggcacttcaatgacagtggagcctgtgtacctcgctgtccacagcctcttgtctacaacaagctaactttccagctggaacccaatccccacaccaagtatcagtatggaggagtttgtgtagccagctgtccccataactttgtggtggatcaaacatcctgtgtcagggcctgtcctcctgacaagatggaagtagataaaaatgggctcaagatgtgtgagccttgtgggggactatgtcccaaagcctgtgagggaacaggctctgggagccgcttccagactgtggactcgagcaacattgatggatttgtgaactgcaccaagatcctgggcaacctggactttctgatcaccggcctcaatggagacccctggcacaagatccctgccctggacccagagaagctcaatgtcttccggacagtacgggagatcacaggttacctgaacatccagtcctggccgccccacatgcacaacttcagtgttttttccaatttgacaaccattggaggcagaagcctctacaaccggggcttctcattgttgatcatgaagaacttgaatgtcacatctctgggcttccgatccctgaaggaaattagtgctgggcgtatctatataagtgccaataggcagctctgctaccaccactctttgaactggaccaaggtgcttcgggggcctacggaagagcgactagacatcaagcataatcggccgcgcagagactgcgtggcagagggcaaagtgtgtgacccactgtgctcctctgggggatgctggggcccaggccctggtcagtgcttgtcctgtcgaaattatagccgaggaggtgtctgtgtgacccactgcaactttctgaatggggagcctcgagaatttgcccatgaggccgaatgcttctcctgccacccggaatgccaacccatggggggcactgccacatgcaatggctcgggctctgatacttgtgctcaatgtgcccattttcgagatgggccccactgtgtgagcagctgcccccatggagtcctaggtgccaagggcccaatctacaagtacccagatgttcagaatgaatgtcggccctgccatgagaactgcacccaggggtgtaaaggaccagagcttcaagactgtttaggacaaacactggtgctgatcggcaaaacccatctgacaatggctttgacagtgatagcaggattggtagtgattttcatgatgctgggcggcacttttctctactggcgtgggcgccggattcagaataaaagggctatgaggcgatacttggaacggggtgagagcatagagcctctggaccccagtgagaaggctaacaaagtcttggccagaatcttcaaagagacagagctaaggaagcttaaagtgcttggctcgggtgtctttggaactgtgcacaaaggagtgtggatccctgagggtgaatcaatcaagattccagtctgcattaaagtcattgaggacaagagtggacggcagagttttcaagctgtgacagatcatatgctggccattggcagcctggaccatgcccacattgtaaggctgctgggactatgcccagggtcatctctgcagcttgtcactcaatatttgcctctgggttctctgctggatcatgtgagacaacaccggggggcactggggccacagctgctgctcaactggggagtacaaattgccaagggaatgtactaccttgaggaacatggtatggtgcatagaaacctggctgcccgaaacgtgctactcaagtcacccagtcaggttcaggtggcagattttggtgtggctgacctgctgcctcctgatgataagcagctgctatacagtgaggccaagactccaattaagtggatggcccttgagagtatccactttgggaaatacacacaccagagtgatgtctggagctatggtgtgacagtttgggagttgatgaccttcggggcagagccctatgcagggctacgattggctgaagtaccagacctgctagagaagggggagcggttggcacagccccagatctgcacaattgatgtctacatggtgatggtcaagtgttggatgattgatgagaacattcgcccaacctttaaagaactagccaatgagttcaccaggatggcccgagacccaccacggtatctggtcataaagagagagagtgggcctggaatagcccctgggccagagccccatggtctgacaaacaagaagctagaggaagtagagctggagccagaactagacctagacctagacttggaagcagaggaggacaacctggcaaccaccacactgggctccgccctcagcctaccagttggaacacttaatcggccacgtgggagccagagccttttaagtccatcatctggatacatgcccatgaaccagggtaatcttggggggtcttgccaggagtctgcagtttctgggagcagtgaacggtgcccccgtccagtctctctacacccaatgccacggggatgcctggcatcagagtcatcagaggggcatgtaacaggctctgaggctgagctccaggagaaagtgtcaatgtgtagaagccggagcaggagccggagcccacggccacgcggagatagcgcctaccattcccagcgccacagtctgctgactcctgttaccccactctccccacccgggttagaggaagaggatgtcaacggttatgtcatgccagatacacacctcaaaggtactccctcctcccgggaaggcaccctttcttcagtgggtctcagttctgtcctgggtactgaagaagaagatgaagatgaggagtatgaatacatgaaccggaggagaaggcacagtccacctcatccccctaggccaagttcccttgaggagctgggttatgagtacatggatgtggggtcagacctcagtgcctctctgggcagcacacagagttgcccactccaccctgtacccatcatgcccactgcaggcacaactccagatgaagactatgaatatatgaatcggcaacgagatggaggtggtcctgggggtgattatgcagccatgggggcctgcccagcatctgagcaagggtatgaagagatgagagcttttcaggggcctggacatcaggccccccatgtccattatgcccgcctaaaaactctacgtagcttagaggctacagactctgcctttgataaccctgattactggcatagcaggcttttccccaaggctaatgcccagagaacgtaa

SEQ ID NO: 347 - DNA, 3874 bp, Artificial sequence
  A novel predicted alternative spliced variant
atgagggcgaacgacgctctgcaggtgctgggcttgcttttcagcctggcccggggctccgaggtgggcaactctcaggcagtgtgtcctgggactctgaatggcctgagtgtgaccggcgatgctgagaaccaataccagacactgtacaagctctacgagaggtgtgaggtggtgatggggaaccttgagattgtgctcacgggacacaatgccgacctctccttcctgcagtggattcgagaagtgacaggctatgtcctcgtggccatgaatgaattctctactctaccattgcccaacctccgcgtggtgcgagggacccaggtctacgatgggaagtttgccatcttcgtcatgttgaactataacaccaactccagccacgctctgcgccagctccgcttgactcagctcaccgagattctgtcagggggtgtttatattgagaagaacgataagctttgtcacatggacacaattgactggagggacatcgtgagggaccgagatgctgagatagtggtgaaggacaatggcagaagctgtcccccctgtcatgaggtttgcaaggggcgatgctggggtcctggatcagaagactgccagacattgaccaagaccatctgtgctcctcagtgtaatggtcactgctttgggcccaaccccaaccagtgctgccatgatgagtgtgccgggggctgctcaggccctcaggacacagactgctttgcctgccggcacttcaatgacagtggagcctgtgtacctcgctgtccacagcctcttgtctacaacaagctaactttccagctggaacccaatccccacaccaagtatcagtatggaggagtttgtgtagccagctgtccccataactttgtggtggatcaaacatcctgtgtcagggcctgtcctcctgacaagatggaagtagataaaaatgggctcaagatgtgtgagccttgtgggggactatgtcccaaagcctgtgagggaacaggctctgggagccgcttccagactgtggactcgagcaacattgatggatttgtgaactgcaccaagatcctgggcaacctggactttctgatcaccggcctcaatggagacccctggcacaagatccctgccctggacccagagaagctcaatgtcttccggacagtacgggagatcacaggttacctgaacatccagtcctggccgccccacatgcacaacttcagtgttttttccaatttgacaaccattggaggcagaagcctctacaaccggggcttctcattgttgatcatgaagaacttgaatgtcacatctctgggcttccgatccctgaaggaaattagtgctgggcgtatctatataagtgccaataggcagctctgctaccaccactctttgaactggaccaaggtgcttcgggggcctacggaagagcgactagacatcaagcataatcggccgcgcagagactgcgtggcagagggcaaagtgtgtgacccactgtgctcctctgggggatgctggggcccaggccctggtcagtgcttgtcctgtcgaaattatagccgaggaggtgtctgtgtgacccactgcaactttctgaatggggagcctcgagaatttgcccatgaggccgaatgcttctcctgccacccggaatgccaacccatggggggcactgccacatgcaatggctcggtgtaaaggaccagagcttcaagactgtttaggacaaacactggtgctgatcggcaaaacccatctgacaatggctttgacagtgatagcaggattggtagtgattttcatgatgctgggcggcacttttctctactggcgtgggcgccggattcagaataaaagggctatgaggcgatacttggaacggggtgagagcatagagcctctggaccccagtgagaaggctaacaaagtcttggccagaatcttcaaagagacagagctaaggaagcttaaagtgcttggctcgggtgtctttggaactgtgcacaaaggagtgtggatccctgagggtgaatcaatcaagattccagtctgcattaaagtcattgaggacaagagtggacggcagagttttcaagctgtgacagatcatatgctggccattggcagcctggaccatgcccacattgtaaggctgctgggactatgcccagggtcatctctgcagcttgtcactcaatatttgcctctgggttctctgctggatcatgtgagacaacaccggggggcactggggccacagctgctgctcaactggggagtacaaattgccaagggaatgtactaccttgaggaacatggtatggtgcatagaaacctggctgcccgaaacgtgctactcaagtcacccagtcaggttcaggtggcagattttggtgtggctgacctgctgcctcctgatgataagcagctgctatacagtgaggccaagactccaattaagtggatggcccttgagagtatccactttgggaaatacacacaccagagtgatgtctggagctatggtgtgacagtttgggagttgatgaccttcggggcagagccctatgcagggctacgattggctgaagtaccagacctgctagagaagggggagcggttggcacagccccagatctgcacaattgatgtctacatggtgatggtcaagtgttggatgattgatgagaacattcgcccaacctttaaagaactagccaatgagttcaccaggatggcccgagacccaccacggtatctggtcataaagagagagagtgggcctggaatagcccctgggccagagccccatggtctgacaaacaagaagctagaggaagtagagctggagccagaactagacctagacctagacttggaagcagaggaggacaacctggcaaccaccacactgggctccgccctcagcctaccagttggaacacttaatcggccacgtgggagccagagccttttaagtccatcatctggatacatgcccatgaaccagggtaatcttggggggtcttgccaggagtctgcagtttctgggagcagtgaacggtgcccccgtccagtctctctacacccaatgccacggggatgcctggcatcagagtcatcagaggggcatgtaacaggctctgaggctgagctccaggagaaagtgtcaatgtgtagaagccggagcaggagccggagcccacggccacgcggagatagcgcctaccattcccagcgccacagtctgctgactcctgttaccccactctccccacccgggttagaggaagaggatgtcaacggttatgtcatgccagatacacacctcaaaggtactccctcctcccgggaaggcaccctttcttcagtgggtctcagttctgtcctgggtactgaagaagaagatgaagatgaggagtatgaatacatgaaccggaggagaaggcacagtccacctcatccccctaggccaagttcccttgaggagctgggttatgagtacatggatgtggggtcagacctcagtgcctctctgggcagcacacagagttgcccactccaccctgtacccatcatgcccactgcaggcacaactccagatgaagactatgaatatatgaatcggcaacgagatggaggtggtcctgggggtgattatgcagccatgggggcctgcccagcatctgagcaagggtatgaagagatgagagcttttcaggggcctggacatcaggccccccatgtccattatgcccgcctaaaaactctacgtagcttagaggctacagactctgcctttgataaccctgattactggcatagcaggcttttccccaaggctaatgcccagagaacgtaa

SEQ ID NO: 348 - DNA, 3909 bp, Artificial sequence
  A novel predicted alternative spliced variant
atgagggcgaacgacgctctgcaggtgctgggcttgcttttcagcctggcccggggctccgaggtgggcaactctcaggcagtgtgtcctgggactctgaatggcctgagtgtgaccggcgatgctgagaaccaataccagacactgtacaagctctacgagaggtgtgaggtggtgatggggaaccttgagattgtgctcacgggacacaatgccgacctctccttcctgcagtggattcgagaagtgacaggctatgtcctcgtggccatgaatgaattctctactctaccattgcccaacctccgcgtggtgcgagggacccaggtctacgatgggaagtttgccatcttcgtcatgttgaactataacaccaactccagccacgctctgcgccagctccgcttgactcagctcaccgagattctgtcagggggtgtttatattgagaagaacgataagctttgtcacatggacacaattgactggagggacatcgtgagggaccgagatgctgagatagtggtgaaggacaatggcagaagctgtcccccctgtcatgaggtttgcaaggggcgatgctggggtcctggatcagaagactgccagacattgaccaagaccatctgtgctcctcagtgtaatggtcactgctttgggcccaaccccaaccagtgctgccatgatgagtgtgccgggggctgctcaggccctcaggacacagactgctttgcctgccggcacttcaatgacagtggagcctgtgtacctcgctgtccacagcctcttgtctacaacaagctaactttccagctggaacccaatccccacaccaagtatcagtatggaggagtttgtgtagccagctgtccccataactttgtggtggatcaaacatcctgtgtcagggcctgtcctcctgacaagatggaagtagataaaaatgggctcaagatgtgtgagccttgtgggggactatgtcccaaagcctgtgagggaacaggctctgggagccgcttccagactgtggactcgagcaacattgatggatttgtgaactgcaccaagatcctgggcaacctggactttctgatcaccggcctcaatggagacccctggcacaagatccctgccctggacccagagaagctcaatgtcttccggacagtacgggagatcacaggttacctgaacatccagtcctggccgccccacatgcacaacttcagtgttttttccaatttgacaaccattggaggcagaagcctctacaaccggggcttctcattgttgatcatgaagaacttgaatgtcacatctctgggcttccgatccctgaaggaaattagtgctgggcgtatctatataagtgccaataggcagctctgctaccaccactctttgaactggaccaaggtgcttcgggggcctacggaagagcgactagacatcaagcataatcggccgcgcagagactgcgtggcagagggcaaagtgtgtgacccactgtgctcctctgggggatgctggggcccaggccctggtcagtgcttgtcctgtcgaaattatagccgaggaggtgtctgtgtgacccactgcaactttctgaatggggagcctcgagaatttgcccatgaggccgaatgcttctcctgccacccggaatgccaacccatggggggcactgccacatgcaatggctcgggctctgatacttgtgctcaatgtgcccattttcgagatgggccccactgtgtgagcagctgcccccatggagtcctaggtgccaagggcccaatctacaagtacccagatgttcagaatgaatgtcggccctgccatgagaactgcacccaggggtgtaaaggaccagagcttcaagactgtttaggacaaacactggtgctgatcggcaaaacccatctgacaatggctttgacagtgatagcaggattggtagtgattttcatgatgctgggcggcacttttctctactggcgtgggcgccggattcagaataaaagggctatgaggcgatacttggaacggggtgagggagtgtggatccctgagggtgaatcaatcaagattccagtctgcattaaagtcattgaggacaagagtggacggcagagttttcaagctgtgacagatcatatgctggccattggcagcctggaccatgcccacattgtaaggctgctgggactatgcccagggtcatctctgcagcttgtcactcaatatttgcctctgggttctctgctggatcatgtgagacaacaccggggggcactggggccacagctgctgctcaactggggagtacaaattgccaagggaatgtactaccttgaggaacatggtatggtgcatagaaacctggctgcccgaaacgtgctactcaagtcacccagtcaggttcaggtggcagattttggtgtggctgacctgctgcctcctgatgataagcagctgctatacagtgaggccaagactccaattaagtggatggcccttgagagtatccactttgggaaatacacacaccagagtgatgtctggagctatggtgtgacagtttgggagttgatgaccttcggggcagagccctatgcagggctacgattggctgaagtaccagacctgctagagaagggggagcggttggcacagccccagatctgcacaattgatgtctacatggtgatggtcaagtgttggatgattgatgagaacattcgcccaacctttaaagaactagccaatgagttcaccaggatggcccgagacccaccacggtatctggtcataaagagagagagtgggcctggaatagcccctgggccagagccccatggtctgacaaacaagaagctagaggaagtagagctggagccagaactagacctagacctagacttggaagcagaggaggacaacctggcaaccaccacactgggctccgccctcagcctaccagttggaacacttaatcggccacgtgggagccagagccttttaagtccatcatctggatacatgcccatgaaccagggtaatcttggggggtcttgccaggagtctgcagtttctgggagcagtgaacggtgcccccgtccagtctctctacacccaatgccacggggatgcctggcatcagagtcatcagaggggcatgtaacaggctctgaggctgagctccaggagaaagtgtcaatgtgtagaagccggagcaggagccggagcccacggccacgcggagatagcgcctaccattcccagcgccacagtctgctgactcctgttaccccactctccccacccgggttagaggaagaggatgtcaacggttatgtcatgccagatacacacctcaaaggtactccctcctcccgggaaggcaccctttcttcagtgggtctcagttctgtcctgggtactgaagaagaagatgaagatgaggagtatgaatacatgaaccggaggagaaggcacagtccacctcatccccctaggccaagttcccttgaggagctgggttatgagtacatggatgtggggtcagacctcagtgcctctctgggcagcacacagagttgcccactccaccctgtacccatcatgcccactgcaggcacaactccagatgaagactatgaatatatgaatcggcaacgagatggaggtggtcctgggggtgattatgcagccatgggggcctgcccagcatctgagcaagggtatgaagagatgagagcttttcaggggcctggacatcaggccccccatgtccattatgcccgcctaaaaactctacgtagcttagaggctacagactctgcctttgataaccctgattactggcatagcaggcttttccccaaggctaatgcccagagaacgtaa

SEQ ID NO: 349 - DNA, 3833 bp, Artificial sequence
  A novel predicted alternative spliced variant
atgaagccggcgacaggactttgggtctgggtgagccttctcgtggcggcggggaccgtccagcccagcgattctcagtcagtgtgtgcaggaacggagaataaactgagctctctctctgacctggaacagcagtaccgagccttgcgcaagtactatgaaaactgtgaggttgtcatgggcaacctggagataaccagcattgagcacaaccgggacctctccttcctgcggtctgttcgagaagtcacaggctacgtgttagtggctcttaatcagtttcgttacctgcctctggagaatttacgcattattcgtgggacaaaactttatgaggatcgatatgccttggcaatatttttaaactacagaaaagatggaaactttggacttcaagaacttggattaaagaacttgacagaaatcctaaatggtggagtctatgtagaccagaacaaattcctttgttatgcagacaccattcattggcaagatattgttcggaacccatggccttccaacttgactcttgtgtcaacaaatggtagttcaggatgtggacgttgccataagtcctgtactggccgttgctggggacccacagaaaatcattgccagactttgacaaggacggtgtgtgcagaacaatgtgacggcagatgctacggaccttacgtcagtgactgctgccatcgagaatgtgctggaggctgctcaggacctaaggacacagactgctttgcctgcatgaatttcaatgacagtggagcatgtgttactcagtgtccccaaacctttgtctacaatccaaccacctttcaactggagcacaatttcaatgcaaagtacacatatggagcattctgtgtcaagaaatgtccacataactttgtggtagattccagttcttgtgtgcgtgcctgccctagttccaagatggaagtagaagaaaatgggattaaaatgtgtaaaccttgcactgacatttgcccaaaagcttgtgatggcattggcacaggatcattgatgtcagctcagactgtggattccagtaacattgacaaattcataaactgtaccaagatcaatgggaatttgatctttctagtcactggtattcatggggacccttacaatgcaattgaagccatagacccagagaaactgaacgtctttcggacagtcagagagataacaggtttcctgaacatacagtcatggccaccaaacatgactgacttcagtgttttttctaacctggtgaccattggtggaagagtactctatagtggcctgtccttgcttatcctcaagcaacagggcatcacctctctacagttccagtccctgaaggaaatcagcgcaggaaacatctatattactgacaacagcaacctgtgttattatcataccattaactggacaacactcttcagcacaatcaaccagagaatagtaatccgggacaacagaaaagctgaaaattgtactgctgaaggaatggtgtgcaaccatctgtgttccagtgatggctgttggggacctgggccagaccaatgtctgtcgtgtcgccgcttcagtagaggaaggatctgcatagagtcttgtaacctctatgatggggtcctgacaactgtacaaagtgctctcattttaaagatggcccaaactgtgtggaaaaatgtccagatggcttacagggggcaaacagtttcattttcaagtatgctgatccagatcgggagtgccacccatgccatccaaactgcacccaagggtgtaacggtcccactagtcatgactgcatttactacccatggacgggccattccactttaccacaacatgctagaactcccctgattgcagctggagtaattggtgggctcttcattctggtcattgtgggtctgacatttgctgtttatgttagaaggaagagcatcaaaaagaaaagagccttgagaagattcttggaaacagagttggtggaaccattaactcccagtggcacagcacccaatcaagctcaacttcgtattttgaaagaaactgagctgaagagggtaaaagtccttggctcaggtgcttttggaacggtttataaaggtatttgggtacctgaaggagaaactgtgaagattcctgtggctattaagattcttaatgagacaactggtcccaaggcaaatgtggagttcatggatgaagctctgatcatggcaagtatggatcatccacacctagtccggttgctgggtgtgtgtctgagcccaaccatccagctggttactcaacttatgccccatggctgcctgttggagtatgtccacgagcacaaggataacattggatcacaactgctgcttaactggtgtgtccagatagctaagggaatgatgtacctggaagaaagacgactcgttcatcgggatttggcagcccgtaatgtcttagtgaaatctccaaaccatgtgaaaatcacagattttgggctagccagactcttggaaggagatgaaaaagagtacaatgctgatggaggaaagatgccaattaaatggatggctctggagtgtatacattacaggaaattcacccatcagagtgacgtttggagctatggagttactatatgggaactgatgacctttggaggaaaaccctatgatggaattccaacgcgagaaatccctgatttattagagaaaggagaacgtttgcctcagcctcccatctgcactattgacgtttacatggtcatggtcaaatgttggatgattgatgctgacagtagacctaaatttaaggaactggctgctgagttttcaaggatggctcgagaccctcaaagatacctagttattcagggtgatgatcgtatgaagcttcccagtccaaatgacagcaagttctttcagaatctcttggatgaagaggatttggaagatatgatggatgctgaggagtacttggtccctcaggctttcaacatcccacctcccatctatacttccagagcaagaattgactcgaataggagtgaaattggacacagccctcctcctgcctacacccccatgtcaggaaaccagtttgtataccgagatggaggttttgctgctgaacaaggagtgtctgtgccctacagagccccaactagcacaattccagaagctcctgtggcacagggtgctactgctgagatttttgatgactcctgctgtaatggcaccctacgcaagccagtggcaccccatgtccaagaggacagtagcacccagaggtacagtgctgaccccaccgtgtttgccccagaacggagcccacgaggagagctggatgaggaaggttacatgactcctatgcgagacaaacccaaacaagaatacctgaatccagtggaggagaacccttttgtttctcggagaaaaaatggagaccttcaagcattggataatcccgaatatcacaatgcatccaatggtccacccaaggccgaggatgagtatgtgaatgagccactgtacctcaacacctttgccaacaccttgggaaaagctgagtacctgaagaacaacatactgtcaatgccagagaaggccaagaaagcgtttgacaaccctgactactggaaccacagcctgccacctcggagcacccttcagcacccagactacctgcaggagtacagcacaaaatatttttataaacagaatgggcggatccggcctattgtggcagagaatcctgaatacctctctgagttctccctgaagccaggcactgtgctgccgcctccaccttacagacaccggaatactgtggtgtaa

SEQ ID NO: 350 - DNA, 3852 bp, Artificial sequence
  A novel predicted alternative spliced variant
atgaagccggcgacaggactttgggtctgggtgagccttctcgtggcggcggggaccgtccagcccagcgattctcagtcagtgtgtgcaggaacggagaataaactgagctctctctctgacctggaacagcagtaccgagccttgcgcaagtactatgaaaactgtgaggttgtcatgggcaacctggagataaccagcattgagcacaaccgggacctctccttcctgcggtctgttcgagaagtcacaggctacgtgttagtggctcttaatcagtttcgttacctgcctctggagaatttacgcattattcgtgggacaaaactttatgaggatcgatatgccttggcaatatttttaaactacagaaaagatggaaactttggacttcaagaacttggattaaagaacttgacagaaatcctaaatggtggagtctatgtagaccagaacaaattcctttgttatgcagacaccattcattggcaagatattgttcggaacccatggccttccaacttgactcttgtgtcaacaaatggtagttcaggatgtggacgttgccataagtcctgtactggccgttgctggggacccacagaaaatcattgccagactttgacaaggacggtgtgtgcagaacaatgtgacggcagatgctacggaccttacgtcagtgactgctgccatcgagaatgtgctggaggctgctcaggacctaaggacacagactgctttgcctgcatgaatttcaatgacagtggagcatgtgttactcagtgtccccaaacctttgtctacaatccaaccacctttcaactggagcacaatttcaatgcaaagtacacatatggagcattctgtgtcaagaaatgtccacataactttgtggtagattccagttcttgtgtgcgtgcctgccctagttccaagatggaagtagaagaaaatgggattaaaatgtgtaaaccttgcactgacatttgcccaaaagcttgtgatggcattggcacaggatcattgatgtcagctcagactgtggattccagtaacattgacaaattcataaactgtaccaagatcaatgggaatttgatctttctagtcactggtattcatggggacccttacaatgcaattgaagccatagacccagagaaactgaacgtctttcggacagtcagagagataacaggtttcctgaacatacagtcatggccaccaaacatgactgacttcagtgttttttctaacctggtgaccattggtggaagagtactctatagtggcctgtccttgcttatcctcaagcaacagggcatcacctctctacagttccagtccctgaaggaaatcagcgcaggaaacatctatattactgacaacagcaacctgtgttattatcataccattaactggacaacactcttcagcacaatcaaccagagaatagtaatccgggacaacagaaaagctgaaaattgtactgctgaaggaatggtgtgcaaccatctgtgttccagtgatggctgttggggacctgggccagaccaatgtctgtcgtgtcgccgcttcagtagaggaaggatctgcatagagtcttgtaacctctatgatggtgaatttcgggagtttgagaatggctccatctgtgtggagtgtgacccccagtgtgagaagatggaagatggcctcctcacatgccatggaccgggtcctgacaactgtacaaagtgctctcattttaaagatggcccaaactgtgtggaaaaatgtccagatggcttacagggggcaaacagtttcattttcaagtatgctgatccagatcgggagtgccacccatgccatccaaactgcacccaaggaactcccctgattgcagctggagtaattggtgggctcttcattctggtcattgtgggtctgacatttgctgtttatgttagaaggaagagcatcaaaaagaaaagagccttgagaagattcttggaaacagagttggtggaaccattaactcccagtggcacagcacccaatcaagctcaacttcgtattttgaaagaaactgagctgaagagggtaaaagtccttggctcaggtgcttttggaacggtttataaaggtatttgggtacctgaaggagaaactgtgaagattcctgtggctattaagattcttaatgagacaactggtcccaaggcaaatgtggagttcatggatgaagctctgatcatggcaagtatggatcatccacacctagtccggttgctgggtgtgtgtctgagcccaaccatccagctggttactcaacttatgccccatggctgcctgttggagtatgtccacgagcacaaggataacattggatcacaactgctgcttaactggtgtgtccagatagctaagggaatgatgtacctggaagaaagacgactcgttcatcgggatttggcagcccgtaatgtcttagtgaaatctccaaaccatgtgaaaatcacagattttgggctagccagactcttggaaggagatgaaaaagagtacaatgctgatggaggaaagatgccaattaaatggatggctctggagtgtatacattacaggaaattcacccatcagagtgacgtttggagctatggagttactatatgggaactgatgacctttggaggaaaaccctatgatggaattccaacgcgagaaatccctgatttattagagaaaggagaacgtttgcctcagcctcccatctgcactattgacgtttacatggtcatggtcaaatgttggatgattgatgctgacagtagacctaaatttaaggaactggctgctgagttttcaaggatggctcgagaccctcaaagatacctagttattcagggtgatgatcgtatgaagcttcccagtccaaatgacagcaagttctttcagaatctcttggatgaagaggatttggaagatatgatggatgctgaggagtacttggtccctcaggctttcaacatcccacctcccatctatacttccagagcaagaattgactcgaataggagtgaaattggacacagccctcctcctgcctacacccccatgtcaggaaaccagtttgtataccgagatggaggttttgctgctgaacaaggagtgtctgtgccctacagagccccaactagcacaattccagaagctcctgtggcacagggtgctactgctgagatttttgatgactcctgctgtaatggcaccctacgcaagccagtggcaccccatgtccaagaggacagtagcacccagaggtacagtgctgaccccaccgtgtttgccccagaacggagcccacgaggagagctggatgaggaaggttacatgactcctatgcgagacaaacccaaacaagaatacctgaatccagtggaggagaacccttttgtttctcggagaaaaaatggagaccttcaagcattggataatcccgaatatcacaatgcatccaatggtccacccaaggccgaggatgagtatgtgaatgagccactgtacctcaacacctttgccaacaccttgggaaaagctgagtacctgaagaacaacatactgtcaatgccagagaaggccaagaaagcgtttgacaaccctgactactggaaccacagcctgccacctcggagcacccttcagcacccagactacctgcaggagtacagcacaaaatatttttataaacagaatgggcggatccggcctattgtggcagagaatcctgaatacctctctgagttctccctgaagccaggcactgtgctgccgcctccaccttacagacaccggaatactgtggtgtaa

SEQ ID NO: 351 - DNA, 1872 bp, Artificial sequence
  A novel predicted alternative spliced variant
atgtccgagcgcaaagaaggcagaggcaaagggaagggcaagaagaaggagcgaggctccggcaagaagccggagtccgcggcgggcagccagagcccagccttgcctccccgattgaaagagatgaaaagccaggaatcggctgcaggttccaaactagtccttcggtgtgaaaccagttctgaatactcctctctcagattcaagtggttcaagaatgggaatgaattgaatcgaaaaaacaaaccacaaaatatcaagatacaaaaaaagccagggaagtcagaacttcgcattaacaaagcatcactggctgattctggagagtatatgtgcaaagtgatcagcaaattaggaaatgacagtgcctctgccaatatcaccatcgtggaatcaaacgagatcatcactggtatgccagcctcaactgaaggagcatatgtgtcttcagctacatctacatccaccactgggacaagccatcttgtaaaatgtgcggagaaggagaaaactttctgtgtgaatggaggggagtgcttcatggtgaaagacctttcaaacccctcgagatacttgtgcaagtgccaacctggattcactggagcaagatgtactgagaatgtgcccatgaaagtccaaaaccaagaaaaggcggaggagctgtaccagaagagagtgctgaccataaccggcatctgcatcgccctccttgtggtcggcatcatgtgtgtggtggcctactgcaaaaccaagaaacagcggaaaaagctgcatgaccgtcttcggcagagccttcggtctgaacgaaacaatatgatgaacattgccaatgggcctcaccatcctaacccaccccccgagaatgtccagctggtgaatcaatacgtatctaaaaacgtcatctccagtgagcatattgttgagagagaagcagagacatccttttccaccagtcactatacttccacagcccatcactccactactgtcacccagactcctagccacagctggagcaacggacacactgaaagcatcctttccgaaagccactctgtaatcgtgatgtcatccgtagaaaacagtaggcacagcagcccaactgggggcccaagaggacgtcttaatggcacaggaggccctcgtgaatgtaacagcttcctcaggcatgccagagaaacccctgattcctaccgagactctcctcatagtgaaaggtatgtgtcagccatgaccaccccggctcgtatgtcacctgtagatttccacacgccaagctcccccaaatcgcccccttcggaaatgtctccacccgtgtccagcatgacggtgtccatgccttccatggcggtcagccccttcatggaagaagagagacctctacttctcgtgacaccaccaaggctgcgggagaagaagtttgaccatcaccctcagcagttcagctccttccaccacaaccccgcgcatgacagtaacagcctccctgctagccccttgaggatagtggaggatgaggagtatgaaacgacccaagagtacgagccagcccaagagcctgttaagaaactcgccaatagccggcgggccaaaagaaccaagcccaatggccacattgctaacagattggaagtggacagcaacacaagctcccagagcagtaactcagagagtgaaacagaagatgaaagagtaggtgaagatacgcctttcctgggcatacagaaccccctggcagccagtcttgaggcaacacctgccttccgcctggctgacagcaggactaacccagcaggccgcttctcgacacaggaagaaatccaggccaggctgtctagtgtaattgctaaccaagaccctattgctgtataa

SEQ ID NO: 352 - DNA, 1855 bp, Artificial sequence
  A novel predicted alternative spliced variant
atgtccgagcgcaaagaaggcagaggcaaagggaagggcaagaagaaggagcgaggctccggcaagaagccggagtccgcggcgggcagccagagcccagccttgcctccccgattgaaagagatgaaaagccaggaatcggctgcaggttccaaactagtccttcggtgtgaaaccagttctgaatactcctctctcagattcaagtggttcaagaatgggaatgaattgaatcgaaaaaacaaaccacaaaatatcaagatacaaaaaaagccagggaagtcagaacttcgcattaacaaagcatcactggctgattctggagagtatatgtgcaaagtgatcagcaaattaggaaatgacagtgcctctgccaatatcaccatcgtggaatcaaacgagatcatcactggtatgccagcctcaactgaaggagcatatgtgtcttcagagtctcccattagaatatcagtatccacagaaggagcaaatacttcttcatctacatctacatccaccactgggacaagccatcttgtaaaatgtgcggagaaggagaaaactttctgtgtgaatggaggggagtgcttcatggtgaaagacctttcaaacccctcgagatacttgtgcaaaggcggaggagctgtaccagaagagagtgctgaccataaccggcatctgcatcgccctccttgtggtcggcatcatgtgtgtggtggcctactgcaaaaccaagaaacagcggaaaaagctgcatgaccgtcttcggcagagccttcggtctgaacgaaacaatatgatgaacattgccaatgggcctcaccatcctaacccaccccccgagaatgtccagctggtgaatcaatacgtatctaaaaacgtcatctccagtgagcatattgttgagagagaagcagagacatccttttccaccagtcactatacttccacagcccatcactccactactgtcacccagactcctagccacagctggagcaacggacacactgaaagcatcctttccgaaagccactctgtaatcgtgatgtcatccgtagaaaacagtaggcacagcagcccaactgggggcccaagaggacgtcttaatggcacaggaggccctcgtgaatgtaacagcttcctcaggcatgccagagaaacccctgattcctaccgagactctcctcatagtgaaaggtatgtgtcagccatgaccaccccggctcgtatgtcacctgtagatttccacacgccaagctcccccaaatcgcccccttcggaaatgtctccacccgtgtccagcatgacggtgtccatgccttccatggcggtcagccccttcatggaagaagagagacctctacttctcgtgacaccaccaaggctgcgggagaagaagtttgaccatcaccctcagcagttcagctccttccaccacaaccccgcgcatgacagtaacagcctccctgctagccccttgaggatagtggaggatgaggagtatgaaacgacccaagagtacgagccagcccaagagcctgttaagaaactcgccaatagccggcgggccaaaagaaccaagcccaatggccacattgctaacagattggaagtggacagcaacacaagctcccagagcagtaactcagagagtgaaacagaagatgaaagagtaggtgaagatacgcctttcctgggcatacagaaccccctggcagccagtcttgaggcaacacctgccttccgcctggctgacagcaggactaacccagcaggccgcttctcgacacaggaagaaatccaggccaggctgtctagtgtaattgctaaccaagaccctattgctgtataa

SEQ ID NO: 353 - DNA, 1887 bp, Artificial sequence
  A novel predicted alternative spliced variant
atgtccgagcgcaaagaaggcagaggcaaagggaagggcaagaagaaggagcgaggctccggcaagaagccggagtccgcggcgggcagccagagcccagccttgcctccccaattgaaagagatgaaaagccaggaatcggctgcaggttccaaactagtccttcggtgtgaaaccagttctgaatactcctctctcagattcaagtggttcaagaatgggaatgaattgaatcgaaaaaacaaaccacaaaatatcaagatacaaaaaaagccagggaagtcagaacttcgcattaacaaagcatcactggctgattctggagagtatatgtgcaaagtgatcagcaaattaggaaatgacagtgcctctgccaatatcaccatcgtggaatcaaacgagatcatcactggtatgccagcctcaactgaaggagcatatgtgtcttcagctacatctacatccaccactgggacaagccatcttgtaaaatgtgcggagaaggagaaaactttctgtgtgaatggaggggagtgcttcatggtgaaagacctttcaaacccctcgagatacttgtgcaagtgcccaaatgagtttactggtgatcgctgccaaaactacgtaatggccagcttctacaagcatcttgggattgaatttatggaggcggaggagctgtaccagaagagagtgctgaccataaccggcatctgcatcgccctccttgtggtcggcatcatgtgtgtggtggcctactgcaaaaccaagaaacagcggaaaaagctgcatgaccgtcttcggcagagccttcggtctgaacgaaacaatatgatgaacattgccaatgggcctcaccatcctaacccaccccccgagaatgtccagctggtgaatcaatacgtatctaaaaacgtcatctccagtgagcatattgttgagagagaagcagagacatccttttccaccagtcactatacttccacagcccatcactccactactgtcacccagactcctagccacagctggagcaacggacacactgaaagcatcctttccgaaagccactctgtaatcgtgatgtcatccgtagaaaacagtaggcacagcagcccaactgggggcccaagaggacgtcttaatggcacaggaggccctcgtgaatgtaacagcttcctcaggcatgccagagaaacccctgattcctaccgagactctcctcatagtgaaaggtatgtgtcagccatgaccaccccggctcgtatgtcacctgtagatttccacacgccaagctcccccaaatcgcccccttcggaaatgtctccacccgtgtccagcatgacggtgtccatgccttccatggcggtcagccccttcatggaagaagagagacctctacttctcgtgacaccaccaaggctgcgggagaagaagtttgaccatcaccctcagcagttcagctccttccaccacaaccccgcgcatgacagtaacagcctccctgctagccccttgaggatagtggaggatgaggagtatgaaacgacccaagagtacgagccagcccaagagcctgttaagaaactcgccaatagccggcgggccaaaagaaccaagcccaatggccacattgctaacagattggaagtggacagcaacacaagctcccagagcagtaactcagagagtgaaacagaagatgaaagagtaggtgaagatacgcctttcctgggcatacagaaccccctggcagccagtcttgaggcaacacctgccttccgcctggctgacagcaggactaacccagcaggccgcttctcgacacaggaagaaatccaggccaggctgtctagtgtaattgctaaccaagaccctattgctgtataa

SEQ ID NO: 354 - DNA, 1879 bp, Artificial sequence
  A novel predicted alternative spliced variant
atgtccgagcgcaaagaaggcagaggcaaagggaagggcaagaagaaggagcgaggctccggcaagaagccggagtccgcggcgggcagccagagcccagccttgcctccccaattgaaagagatgaaaagccaggaatcggctgcaggttccaaactagtccttcggtgtgaaaccagttctgaatactcctctctcagattcaagtggttcaagaatgggaatgaattgaatcgaaaaaacaaaccacaaaatatcaagatacaaaaaaagccagggaagtcagaacttcgcattaacaaagcatcactggctgattctggagagtatatgtgcaaagtgatcagcaaattaggaaatgacagtgcctctgccaatatcaccatcgtggaatcaaacgagatcatcactggtatgccagcctcaactgaaggagcatatgtgtcttcagagtctcccattagaatatcagtatccacagaaggagcaaatacttcttcatctacatctacatccaccactgggacaagccatcttgtaaaatgtgcggagaaggagaaaactttctgtgtgaatggaggggagtgcttcatggtgaaagacctttcaaacccctcgagatacttgtgcaaagcatcttgggattgaatttatggaggcggaggagctgtaccagaagagagtgctgaccataaccggcatctgcatcgccctccttgtggtcggcatcatgtgtgtggtggcctactgcaaaaccaagaaacagcggaaaaagctgcatgaccgtcttcggcagagccttcggtctgaacgaaacaatatgatgaacattgccaatgggcctcaccatcctaacccaccccccgagaatgtccagctggtgaatcaatacgtatctaaaaacgtcatctccagtgagcatattgttgagagagaagcagagacatccttttccaccagtcactatacttccacagcccatcactccactactgtcacccagactcctagccacagctggagcaacggacacactgaaagcatcctttccgaaagccactctgtaatcgtgatgtcatccgtagaaaacagtaggcacagcagcccaactgggggcccaagaggacgtcttaatggcacaggaggccctcgtgaatgtaacagcttcctcaggcatgccagagaaacccctgattcctaccgagactctcctcatagtgaaaggtatgtgtcagccatgaccaccccggctcgtatgtcacctgtagatttccacacgccaagctcccccaaatcgcccccttcggaaatgtctccacccgtgtccagcatgacggtgtccatgccttccatggcggtcagccccttcatggaagaagagagacctctacttctcgtgacaccaccaaggctgcgggagaagaagtttgaccatcaccctcagcagttcagctccttccaccacaaccccgcgcatgacagtaacagcctccctgctagccccttgaggatagtggaggatgaggagtatgaaacgacccaagagtacgagccagcccaagagcctgttaagaaactcgccaatagccggcgggccaaaagaaccaagcccaatggccacattgctaacagattggaagtggacagcaacacaagctcccagagcagtaactcagagagtgaaacagaagatgaaagagtaggtgaagatacgcctttcctgggcatacagaaccccctggcagccagtcttgaggcaacacctgccttccgcctggctgacagcaggactaacccagcaggccgcttctcgacacaggaagaaatccaggccaggctgtctagtgtaattgctaaccaagaccctattgctgtataa

SEQ ID NO: 355 - DNA, 1811 bp, Artificial sequence
  A novel predicted alternative spliced variant
atgtccgagcgcaaagaaggcagaggcaaagggaagggcaagaagaaggagcgaggctccggcaagaagccggagtccgcggcgggcagccagagcccagccttgcctccccaattgaaagagatgaaaagccaggaatcggctgcaggttccaaactagtccttcggtgtgaaaccagttctgaatactcctctctcagattcaagtggttcaagaatgggaatgaattgaatcgaaaaaacaaaccacaaaatatcaagatacaaaaaaagccagggaagtcagaacttcgcattaacaaagcatcactggctgattctggagagtatatgtgcaaagtgatcagcaaattaggaaatgacagtgcctctgccaatatcaccatcgtggaatcaaacgagatcatcactggtatgccagcctcaactgaaggagcatatgtgtcttcagagtctcccattagaatatcagtatccacagaaggagcaaatacttcttcatctacatctacatccaccactgggacaagccatcttgtaaaatgtgcggagaaggagaaaactttctgtgtgaatggaggggagtgcttcatggtgaaagacctttcaaacccctcgagatacttgtgcaagtgcccaaatgagtttactggtgatcgctgccaaaactacgtaatggccagcttctacagaaacagcggaaaaagctgcatgaccgtcttcggcagagccttcggtctgaacgaaacaatatgatgaacattgccaatgggcctcaccatcctaacccaccccccgagaatgtccagctggtgaatcaatacgtatctaaaaacgtcatctccagtgagcatattgttgagagagaagcagagacatccttttccaccagtcactatacttccacagcccatcactccactactgtcacccagactcctagccacagctggagcaacggacacactgaaagcatcctttccgaaagccactctgtaatcgtgatgtcatccgtagaaaacagtaggcacagcagcccaactgggggcccaagaggacgtcttaatggcacaggaggccctcgtgaatgtaacagcttcctcaggcatgccagagaaacccctgattcctaccgagactctcctcatagtgaaaggtatgtgtcagccatgaccaccccggctcgtatgtcacctgtagatttccacacgccaagctcccccaaatcgcccccttcggaaatgtctccacccgtgtccagcatgacggtgtccatgccttccatggcggtcagccccttcatggaagaagagagacctctacttctcgtgacaccaccaaggctgcgggagaagaagtttgaccatcaccctcagcagttcagctccttccaccacaaccccgcgcatgacagtaacagcctccctgctagccccttgaggatagtggaggatgaggagtatgaaacgacccaagagtacgagccagcccaagagcctgttaagaaactcgccaatagccggcgggccaaaagaaccaagcccaatggccacattgctaacagattggaagtggacagcaacacaagctcccagagcagtaactcagagagtgaaacagaagatgaaagagtaggtgaagatacgcctttcctgggcatacagaaccccctggcagccagtcttgaggcaacacctgccttccgcctggctgacagcaggactaacccagcaggccgcttctcgacacaggaagaaatccaggccaggctgtctagtgtaattgctaaccaagaccctattgctgtataa

SEQ ID NO: 356 - DNA, 1835 bp, Artificial sequence
  A novel predicted alternative spliced variant
atgtccgagcgcaaagaaggcagaggcaaagggaagggcaagaagaaggagcgaggctccggcaagaagccggagtccgcggcgggcagccagagcccagccttgcctccccaattgaaagagatgaaaagccaggaatcggctgcaggttccaaactagtccttcggtgtgaaaccagttctgaatactcctctctcagattcaagtggttcaagaatgggaatgaattgaatcgaaaaaacaaaccacaaaatatcaagatacaaaaaaagccagggaagtcagaacttcgcattaacaaagcatcactggctgattctggagagtatatgtgcaaagtgatcagcaaattaggaaatgacagtgcctctgccaatatcaccatcgtggaatcaaacgagatcatcactggtatgccagcctcaactgaaggagcatatgtgtcttcagagtctcccattagaatatcagtatccacagaaggagcaaatacttcttcatctacatctacatccaccactgggacaagccatcttgtaaaatgtgcggagaaggagaaaactttctgtgtgaatggaggggagtgcttcatggtgaaagacctttcaaacccctcgagatacttgtgcaagtgcccaaatgagtttactggtgatcgctgccaaaactacgtaatggccagcttctacaagcatcttgggattgaatttatgggaaacagcggaaaaagctgcatgaccgtcttcggcagagccttcggtctgaacgaaacaatatgatgaacattgccaatgggcctcaccatcctaacccaccccccgagaatgtccagctggtgaatcaatacgtatctaaaaacgtcatctccagtgagcatattgttgagagagaagcagagacatccttttccaccagtcactatacttccacagcccatcactccactactgtcacccagactcctagccacagctggagcaacggacacactgaaagcatcctttccgaaagccactctgtaatcgtgatgtcatccgtagaaaacagtaggcacagcagcccaactgggggcccaagaggacgtcttaatggcacaggaggccctcgtgaatgtaacagcttcctcaggcatgccagagaaacccctgattcctaccgagactctcctcatagtgaaaggtatgtgtcagccatgaccaccccggctcgtatgtcacctgtagatttccacacgccaagctcccccaaatcgcccccttcggaaatgtctccacccgtgtccagcatgacggtgtccatgccttccatggcggtcagccccttcatggaagaagagagacctctacttctcgtgacaccaccaaggctgcgggagaagaagtttgaccatcaccctcagcagttcagctccttccaccacaaccccgcgcatgacagtaacagcctccctgctagccccttgaggatagtggaggatgaggagtatgaaacgacccaagagtacgagccagcccaagagcctgttaagaaactcgccaatagccggcgggccaaaagaaccaagcccaatggccacattgctaacagattggaagtggacagcaacacaagctcccagagcagtaactcagagagtgaaacagaagatgaaagagtaggtgaagatacgcctttcctgggcatacagaaccccctggcagccagtcttgaggcaacacctgccttccgcctggctgacagcaggactaacccagcaggccgcttctcgacacaggaagaaatccaggccaggctgtctagtgtaattgctaaccaagaccctattgctgtataa

SEQ ID NO: 357 - DNA, 1863 bp, Artificial sequence
  A novel predicted alternative spliced variant
atgtccgagcgcaaagaaggcagaggcaaagggaagggcaagaagaaggagcgaggctccggcaagaagccggagtccgcggcgggcagccagagcccagccttgcctccccaattgaaagagatgaaaagccaggaatcggctgcaggttccaaactagtccttcggtgtgaaaccagttctgaatactcctctctcagattcaagtggttcaagaatgggaatgaattgaatcgaaaaaacaaaccacaaaatatcaagatacaaaaaaagccagggaagtcagaacttcgcattaacaaagcatcactggctgattctggagagtatatgtgcaaagtgatcagcaaattaggaaatgacagtgcctctgccaatatcaccatcgtggaatcaaacgagatcatcactggtatgccagcctcaactgaaggagcatatgtgtcttcagctacatctacatccaccactgggacaagccatcttgtaaaatgtgcggagaaggagaaaactttctgtgtgaatggaggggagtgcttcatggtgaaagacctttcaaacccctcgagatacttgtgcaagtgcccaaatgagtttactggtgatcgctgccaaaactacgtaatggccagcttctacaaggcggaggagctgtaccagaagagagtgctgaccataaccggcatctgcatcgccctccttgtggtcggcatcatgtgtgtggtggcctactgcaaaaccaagaaacagcggaaaaagctgcatgaccgtcttcggcagagccttcggtctgaacgaaacaatatgatgaacattgccaatgggcctcaccatcctaacccaccccccgagaatgtccagctggtgaatcaatacgtatctaaaaacgtcatctccagtgagcatattgttgagagagaagcagagacatccttttccaccagtcactatacttccacagcccatcactccactactgtcacccagactcctagccacagctggagcaacggacacactgaaagcatcctttccgaaagccactctgtaatcgtgatgtcatccgtagaaaacagtaggcacagcagcccaactgggggcccaagaggacgtcttaatggcacaggaggccctcgtgaatgtaacagcttcctcaggcatgccagagaaacccctgattcctaccgagactctcctcatagtgaaaggtatgtgtcagccatgaccaccccggctcgtatgtcacctgtagatttccacacgccaagctcccccaaatcgcccccttcggaaatgtctccacccgtgtccagcatgacggtgtccaagccttccatggcggtcagccccttcatggaagaagagagacctctacttctcgtgacaccaccaaggctgcgggagaagaagtttgaccatcaccctcagcagttcagctccttccaccacaaccccgcgcatgacagtaacagcctccctgctagccccttgaggatagtggaggatgaggagtatgaaacgacccaagagtacgagccagcccaagagcctgttaagaaactcgccaatagccggcgggccaaaagaaccaagcccaatggccacattgctaacagattggaagtggacagcaacacaagctcccagagcagtaactcagagagtgaaacagaagatgaaagagtaggtgaagatacgcctttcctgggcatacagaaccccctggcagccagtcttgaggcaacacctgccttccgcctggctgacagcaggactaacccagcaggccgcttctcgacacaggaagaaatccaggccaggctgtctagtgtaattgctaaccaagaccctattgctgtataa

SEQ ID NO: 358 - DNA, 1811 bp, Artificial sequence
  A novel predicted alternative spliced variant
atgtccgagcgcaaagaaggcagaggcaaagggaagggcaagaagaaggagcgaggctccggcaagaagccggagtccgcggcgggcagccagagcccagccttgcctccccaattgaaagagatgaaaagccaggaatcggctgcaggttccaaactagtccttcggtgtgaaaccagttctgaatactcctctctcagattcaagtggttcaagaatgggaatgaattgaatcgaaaaaacaaaccacaaaatatcaagatacaaaaaaagccagggaagtcagaacttcgcattaacaaagcatcactggctgattctggagagtatatgtgcaaagtgatcagcaaattaggaaatgacagtgcctctgccaatatcaccatcgtggaatcaaacgagatcatcactggtatgccagcctcaactgaaggagcatatgtgtcttcagagtctcccattagaatatcagtatccacagaaggagcaaatacttcttcatctacatctacatccaccactgggacaagccatcttgtaaaatgtgcggagaaggagaaaactttctgtgtgaatggaggggagtgcttcatggtgaaagacctttcaaacccctcgagatacttgtgcaagtgcccaaatgagtttactggtgatcgctgccaaaactacgtaatggccagcttctacagaaacagcggaaaaagctgcatgaccgtcttcggcagagccttcggtctgaacgaaacaatatgatgaacattgccaatgggcctcaccatcctaacccaccccccgagaatgtccagctggtgaatcaatacgtatctaaaaacgtcatctccagtgagcatattgttgagagagaagcagagacatccttttccaccagtcactatacttccacagcccatcactccactactgtcacccagactcctagccacagctggagcaacggacacactgaaagcatcctttccgaaagccactctgtaatcgtgatgtcatccgtagaaaacagtaggcacagcagcccaactgggggcccaagaggacgtcttaatggcacaggaggccctcgtgaatgtaacagcttcctcaggcatgccagagaaacccctgattcctaccgagactctcctcatagtgaaaggtatgtgtcagccatgaccaccccggctcgtatgtcacctgtagatttccacacgccaagctcccccaaatcgcccccttcggaaatgtctccacccgtgtccagcatgacggtgtccaagccttccatggcggtcagccccttcatggaagaagagagacctctacttctcgtgacaccaccaaggctgcgggagaagaagtttgaccatcaccctcagcagttcagctccttccaccacaaccccgcgcatgacagtaacagcctccctgctagccccttgaggatagtggaggatgaggagtatgaaacgacccaagagtacgagccagcccaagagcctgttaagaaactcgccaatagccggcgggccaaaagaaccaagcccaatggccacattgctaacagattggaagtggacagcaacacaagctcccagagcagtaactcagagagtgaaacagaagatgaaagagtaggtgaagatacgcctttcctgggcatacagaaccccctggcagccagtcttgaggcaacacctgccttccgcctggctgacagcaggactaacccagcaggccgcttctcgacacaggaagaaatccaggccaggctgtctagtgtaattgctaaccaagaccctattgctgtataa

SEQ ID NO: 359 - DNA, 675 bp, Artificial sequence
  A novel predicted alternative spliced variant
atgtccgagcgcaaagaaggcagaggcaaagggaagggcaagaagaaggagcgaggctccggcaagaagccggagtccgcggcgggcagccagagcccagccttgcctccccaattgaaagagatgaaaagccaggaatcggctgcaggttccaaactagtccttcggtgtgaaaccagttctgaatactcctctctcagattcaagtggttcaagaatgggaatgaattgaatcgaaaaaacaaaccacaaaatatcaagatacaaaaaaagccagggaagtcagaacttcgcattaacaaagcatcactggctgattctggagagtatatgtgcaaagtgatcagcaaattaggaaatgacagtgcctctgccaatatcaccatcgtggaatcaaacgagatcatcactggtatgccagcctcaactgaaggagcatatgtgtcttcagctacatctacatccaccactgggacaagccatcttgtaaaatgtgcggagaaggagaaaactttctgtgtgaatggaggggagtgcttcatggtgaaagacctttcaaacccctcgagatacttgtgcaagtgcccaaatgagtttactggtgatcgctgccaaaactacgtaatggccagcttctacagtacgtccactccctttctgtctctgcctgaatag

SEQ ID NO: 360 - DNA, 585 bp, Artificial sequence
  A novel predicted alternative spliced variant
atgtccgagcgcaaagaaggcagaggcaaagggaagggcaagaagaaggagcgaggctccggcaagaagccggagtccgcggcgggcagccagagcccagccttgcctccccaattgaaagagatgaaaagccaggaatcggctgcaggttccaaactagtccttcggtgtgaaaccagttctgaatactcctctctcagattcaagtggttcaagaatgggaatgaattgaatcgaaaaaacaaaccacaaaatatcaagatacaaaaaaagccagggaagtcagaacttcgcattaacaaagcatcactggctgattctggagagtatatgtgcaaagtgatcagcaaattaggaaatgacagtgcctctgccaatatcaccatcgtggaatcaaacgagatcatcactggtatgccagcctcaactgaaggagcatatgtgtcttcagctacatctacatccaccactgggacaagccatcttgtaaaatgtgcggagaaggagaaaactttctgtgtgaatggaggggagtgcttcatggtgaaagacctttcaaacccctcgagatacttgtgcaagtaa

SEQ ID NO: 361 - DNA, 675 bp, Artificial sequence
  A novel predicted alternative spliced variant
atgtccgagcgcaaagaaggcagaggcaaagggaagggcaagaagaaggagcgaggctccggcaagaagccggagtccgcggcgggcagccagagcccagccttgcctccccgattgaaagagatgaaaagccaggaatcggctgcaggttccaaactagtccttcggtgtgaaaccagttctgaatactcctctctcagattcaagtggttcaagaatgggaatgaattgaatcgaaaaaacaaaccacaaaatatcaagatacaaaaaaagccagggaagtcagaacttcgcattaacaaagcatcactggctgattctggagagtatatgtgcaaagtgatcagcaaattaggaaatgacagtgcctctgccaatatcaccatcgtggaatcaaacgagatcatcactggtatgccagcctcaactgaaggagcatatgtgtcttcagctacatctacatccaccactgggacaagccatcttgtaaaatgtgcggagaaggagaaaactttctgtgtgaatggaggggagtgcttcatggtgaaagacctttcaaacccctcgagatacttgtgcaagtgcccaaatgagtttactggtgatcgctgccaaaactacgtaatggccagcttctacagtacgtccactccctttctgtctctgcctgaatag

SEQ ID NO: 362 - DNA, 1634 bp, Artificial sequence
  A novel predicted alternative spliced variant
atgtccgagcgcaaagaaggcagaggcaaagggaagggcaagaagaaggagcgaggctccggcaagaagccggagtccgcggcgggcagccagagcccagccttgcctccccgattgaaagagatgaaaagccaggaatcggctgcaggttccaaactagtccttcggtgtgaaaccagttctgaatactcctctctcagattcaagtggttcaagaatgggaatgaattgaatcgaaaaaacaaaccacaaaatatcaagatacaaaaaaagccagggaagtcagaacttcgcattaacaaagcatcactggctgattctggagagtatatgtgcaaagtgatcagcaaattaggaaatgacagtgcctctgccaatatcaccatcgtggaatcaaacgagatcatcactggtatgccagcctcaactgaaggagcatatgtgtcttcagctacatctacatccaccactgggacaagccatcttgtaaaatgtgcggagaaggagaaaactttctgtgtgaatggaggggagtgcttcatggtgaaagacctttcaaacccctcgagatacttgtgcaagtgccaacctggattcactggagcaagatgtactgagaatgtgcccatgaaagtccaaaaccaagaaaaggcggaggagctgtaccagaagagagtgctgaccataaccggcatctgcatcgccctccttgtggtcggcatcatgtgtgtggtggcctactgcaaaaccaagaaacagcggaaaaagctgcatgaccgtcttcggcagagccttcggtctgaacgaaacaatatgatgaacattgccaatgggcctcaccatcctaacccaccccccgagaatgtccagctggtgaatcaatacgtatctaaaaacgtcatctccagtgagcatattgttgagagagaagcagagacatccttttccaccagtcactatacttccacagcccatcactccactactgtcacccagactcctagccacagctggagcaacggacacactgaaagcatcctttccgaaagccactctgtaatcgtgatgtcatccgtagaaaacagtaggcacagcagcccaactgggggcccaagaggacgtcttaatggcacaggaggccctcgtgaatgtaacagcttcctcaggcatgccagagaaacccctgattcctaccgagactctcctcatagtgaaagacataaccttatagctgagctaaggagaaacaaggcacacagatccaaatgcatgcagatccagctatcagcaactcatcttagatcttcttccattccccatttgggcttcattctctaagaccccttggcctttaggaaggtatgtgtcagccatgaccaccccggctcgtatgtcacctgtagatttccacacgccaagctcccccaaatcgcccccttcggaaatgtctccacccgtgtccagcatgacggtgtccatgccttccatggcggtcagccccttcatggaagaagagagacctctacttctcgtgacaccaccaaggctgcgggagaagaagtttgaccatcaccctcagcagttcagctccttccaccacaaccccacgcgcccacgcgtccgcggacgcgtgg

SEQ ID NO: 363 - DNA, 1617 bp, Artificial sequence
  A novel predicted alternative spliced variant
atgtccgagcgcaaagaaggcagaggcaaagggaagggcaagaagaaggagcgaggctccggcaagaagccggagtccgcggcgggcagccagagcccagccttgcctccccgattgaaagagatgaaaagccaggaatcggctgcaggttccaaactagtccttcggtgtgaaaccagttctgaatactcctctctcagattcaagtggttcaagaatgggaatgaattgaatcgaaaaaacaaaccacaaaatatcaagatacaaaaaaagccagggaagtcagaacttcgcattaacaaagcatcactggctgattctggagagtatatgtgcaaagtgatcagcaaattaggaaatgacagtgcctctgccaatatcaccatcgtggaatcaaacgagatcatcactggtatgccagcctcaactgaaggagcatatgtgtcttcagagtctcccattagaatatcagtatccacagaaggagcaaatacttcttcatctacatctacatccaccactgggacaagccatcttgtaaaatgtgcggagaaggagaaaactttctgtgtgaatggaggggagtgcttcatggtgaaagacctttcaaacccctcgagatacttgtgcaaaggcggaggagctgtaccagaagagagtgctgaccataaccggcatctgcatcgccctccttgtggtcggcatcatgtgtgtggtggcctactgcaaaaccaagaaacagcggaaaaagctgcatgaccgtcttcggcagagccttcggtctgaacgaaacaatatgatgaacattgccaatgggcctcaccatcctaacccaccccccgagaatgtccagctggtgaatcaatacgtatctaaaaacgtcatctccagtgagcatattgttgagagagaagcagagacatccttttccaccagtcactatacttccacagcccatcactccactactgtcacccagactcctagccacagctggagcaacggacacactgaaagcatcctttccgaaagccactctgtaatcgtgatgtcatccgtagaaaacagtaggcacagcagcccaactgggggcccaagaggacgtcttaatggcacaggaggccctcgtgaatgtaacagcttcctcaggcatgccagagaaacccctgattcctaccgagactctcctcatagtgaaagacataaccttatagctgagctaaggagaaacaaggcacacagatccaaatgcatgcagatccagctatcagcaactcatcttagatcttcttccattccccatttgggcttcattctctaagaccccttggcctttaggaaggtatgtgtcagccatgaccaccccggctcgtatgtcacctgtagatttccacacgccaagctcccccaaatcgcccccttcggaaatgtctccacccgtgtccagcatgacggtgtccatgccttccatggcggtcagccccttcatggaagaagagagacctctacttctcgtgacaccaccaaggctgcgggagaagaagtttgaccatcaccctcagcagttcagctccttccaccacaaccccacgcgcccacgcgtccgcggacgcgtgg

SEQ ID NO: 364 - DNA, 1543 bp, Artificial sequence
  A novel predicted alternative spliced variant
atgtccgagcgcaaagaaggcagaggcaaagggaagggcaagaagaaggagcgaggctccggcaagaagccggagtccgcggcgggcagccagagcccagccttgcctccccgattgaaagagatgaaaagccaggaatcggctgcaggttccaaactagtccttcggtgtgaaaccagttctgaatactcctctctcagattcaagtggttcaagaatgggaatgaattgaatcgaaaaaacaaaccacaaaatatcaagatacaaaaaaagccagggaagtcagaacttcgcattaacaaagcatcactggctgattctggagagtatatgtgcaaagtgatcagcaaattaggaaatgacagtgcctctgccaatatcaccatcgtggaatcaaacgagatcatcactggtatgccagcctcaactgaaggagcatatgtgtcttcagagtctcccattagaatatcagtatccacagaaggagcaaatacttcttcatctacatctacatccaccactgggacaagccatcttgtaaaatgtgcggagaaggagaaaactttctgtgtgaatggaggggagtgcttcatggtgaaagacctttcaaacccctcgagatacttgtgcaagtgccaacctggattcactggagcaagatgtactgagaatgtgcccatgaaagtccaaaaccaagaaaaggcggaggagctgtaccagaagagagtgctgaccataaccggcatctgcatcgccctccttgtggtcggcatcatgtgtgtggtggcctactgcaaaaccaagaaacagcggaaaaagctgcatgaccgtcttcggcagagccttcggtctgaacgaaacaatatgatgaacattgccaatgggcctcaccatcctaacccaccccccgagaatgtccagctggtgaatcaatacgtatctaaaaacgtcatctccagtgagcatattgttgagagagaagcagagacatccttttccaccagtcactatacttccacagcccatcactccactactgtcacccagactcctagccacagctggagcaacggacacactgaaagcatcctttccgaaagccactctgtaatcgtgatgtcatccgtagaaaacagtaggcacagcagcccaactgggggcccaagaggacgtcttaatggcacaggaggccctcgtgaatgtaacagcttcctcaggcatgccagagaaacccctgattcctaccgagactctcctcatagtgaaaggtatgtgtcagccatgaccaccccggctcgtatgtcacctgtagatttccacacgccaagctcccccaaatcgcccccttcggaaatgtctccacccgtgtccagcatgacggtgtccatgccttccatggcggtcagccccttcatggaagaagagagacctctacttctcgtgacaccaccaaggctgcgggagaagaagtttgaccatcaccctcagcagttcagctccttccaccacaaccccacgcgcccacgcgtccgcggacgcgtgg

SEQ ID NO: 365 - DNA, 3543 bp, Artificial sequence
  A novel predicted alternative spliced variant
atgcgttccccacggacgcgcggccggtccgggcgccccctaagcctcctgctcgccctgctctgtgccctgcgagccaaggtgtgtggggcctcgggtcagttcgagttggagatcctgtccatgcagaacgtgaacggggagctgcagaacgggaactgctgcggcggcgcccggaacccgggagaccgcaagtgcacccgcgacgagtgtgacacatacttcaaagtgtgcctcaaggagtatcagtcccgcgtcacggccggggggccctgcagcttcggctcagggtccacgcctgtcatcgggggcaacaccttcaacctcaaggccagccgcggcaacgaccgcaaccgcatcgtgctgcctttcagtttcgcctggccgaggtcctatacgttgcttgtggaggcgtgggattccagtaatgacaccgttcaacctgacagtattattgaaaaggcttctcactcgggcatgatcaaccccagccggcagtggcagacgctgaagcagaacacgggcgttgcccactttgagtatcagatccgcgtgacctgtgatgactactactatggctttggctgcaataagttctgccgccccagagatgacttctttggacactatgcctgtgaccagaatggcaacaaaacttgcatggaaggctggatgggccccgaatgtaacagagctatttgccgacaaggctgcagtcctaagcatgggtcttgcaaactcccaggtgactgcaggtgccagtatggctggcaaggcctgtactgtgataagtgcatcccacacccgggatgcgtccacggcatctgtaatgagccctggcagtgcctctgtgagaccaactggggcggccagctctgtgacaaagatctcaattactgtgggactcatcagccgtgtctcaacgggggaacttgtagcaacacaggccctgacaaatatcagtgttcctgccctgaggggtattcaggacccaactgtgaaattgctgagcacgcctgcctctctgatccctgtcacaacagaggcagctgtaaggagacctccctgggctttgagtgtgagtgttccccaggctggaccggccccacatgctctacaaacattgatgactgttctcctaataactgttcccacgggggcacctgccaggacctggttaacggatttaagtgtgtgtgccccccacagtggactgggaaaacgtgccagttagatattaatgactgccttggccagtgtcagaatgacgcctcctgtcgggatttggttaatggttatcgctgtatctgtccacctggctatgcaggcgatcactgtgagagagacatcgatgaatgtgccagcaacccctgtttgaatgggggtcactgtcagaatgaaatcaacagattccagtgtctgtgtcccactggtttctctggaaacctctgtcagctggacatcgattattgtgagcctaatccctgccagaacggtgcccagtgctacaaccgtgccagtgactatttctgcaagtgccccgaggactatgagggcaagaactgctcacacctgaaagaccactgccgcacgaccccctgtgaagtgattgacagctgcacagtggccatggcttccaacgacacacctgaaggggtgcggtatatttcctccaacgtctgtggtcctcacgggaagtgcaagagtcagtcgggaggcaaattcacctgtgactgtaacaaaggcttcacgggaacatactgccatgaaaatattaatgactgtgagagcaacccttgtagaaacggtggcacttgcatcgatggtgtcaactcctacaagtgcatctgtagtgacggctgggagggggcctactgtgaaaccaatattaatgactgcagccagaacccctgccacaatgggggcacgtgtcgcgacctggtcaatgacttctactgtgactgtaaaaatgggtggaaaggaaagacctgccactcacgtgacagtcagtgtgatgaggccacgtgcaacaacggtggcacctgctatgatgagggggatgcttttaagtgcatgtgtcctggcggctgggaaggaacaacctgtaacatagcccgaaacagtagctgcctgcccaacccctgccataatgggggcacatgtgtggtcaacggcgagtcctttacgtgcgtctgcaaggaaggctgggaggggcccatctgtgctcagaataccaatgactgcagccctcatccctgttacaacagcggcacctgtgtggatggagacaactggtaccggtgcgaatgtgccccgggttttgctgggcccgactgcagaataaacatcaatgaatgccagtcttcaccttgtgcctttggagcgacctgtgtggatgagatcaatggctaccggtgtgtctgccctccagggcacagtggtgccaagtgccaggaagtttcagggagaccttgcatcaccatggggagtgtgataccagatggggccaaatgggatgatgactgtaatacctgccagtgcctgaatggacggatcgcctgctcaaaggtctggtgtggccctcgaccttgcctgctccacaaagggcacagcgagtgccccagcgggcagagctgcatccccatcctggacgaccagtgcttcgtccacccctgcactggtgtgggcgagtgtcggtcttccagtctccagccggtgaagacaaagtgcacctctgactcctattaccaggataactgtgcgaacatcacatttacctttaacaaggagatgatgtcaccaggtcttactacggagcacatttgcagtgaattgaggaatttgaatattttgaagaatgtttccgctgaatattcaatctacatcgcttgcgagccttccccttcagcgaacaatgaaatacatgtggccatttctgctgaagatatacgggatgatgggaacccgatcaaggaaatcactgacaaaataatcgatcttgttagtaaacgtgatggaaacagctcgctgattgctgccgttgcagaagtaagagttcagaggcggcctctgaagaacagaacagatttccttgttcccttgctgagctctgtcttaactgtggcttggatctgttgcttggtgacggccttctactggtgcctgcggaagcggcggaagccgggcagccacacacactcagcctctgaggacaacaccaccaacaacgtgcgggagcagctgaaccagatcaaaaaccccattgagaaacatggggccaacacggtccccatcaaggattacgagaacaagaactccaaaatgtctaaaataaggacacacaattctgaagtagaagaggacgacatggacaaacaccagcagaaagcccggtttgccaagcagccggcgtatacgctggtagacagagaagagaagccccccaacggcacgccgacaaaacacccaaactggacaaacaaacaggacaacagagacttggaaagtgcccagagcttaaaccgaatggagtacatcgtatag

SEQ ID NO: 366 - DNA, 3483 bp, Artificial sequence
  A novel predicted alternative spliced variant
atgcgttccccacggacgcgcggccggtccgggcgccccctaagcctcctgctcgccctgctctgtgccctgcgagccaaggtgtgtggggcctcgggtcagttcgagttggagatcctgtccatgcagaacgtgaacggggagctgcagaacgggaactgctgcggcggcgcccggaacccgggagaccgcaagtgcacccgcgacgagtgtgacacatacttcaaagtgtgcctcaaggagtatcagtcccgcgtcacggccggggggccctgcagcttcggctcagggtccacgcctgtcatcgggggcaacaccttcaacctcaaggccagccgcggcaacgaccgcaaccgcatcgtgctgcctttcagtttcgcctggccgaggtcctatacgttgcttgtggaggcgtgggattccagtaatgacaccgttcaacctgacagtattattgaaaaggcttctcactcgggcatgatcaaccccagccggcagtggcagacgctgaagcagaacacgggcgttgcccactttgagtatcagatccgcgtgacctgtgatgactactactatggctttggctgcaataagttctgccgccccagagatgacttctttggacactatgcctgtgaccagaatggcaacaaaacttgcatggaaggctggatgggccccgaatgtaacagagctatttgccgacaaggctgcagtcctaagcatgggtcttgcaaactcccaggtgactgcaggtgccagtatggctggcaaggcctgtactgtgataagtgcatcccacacccgggatgcgtccacggcatctgtaatgagccctggcagtgcctctgtgagaccaactggggcggccagctctgtgacaaagatctcaattactgtgggactcatcagccgtgtctcaacgggggaacttgtagcaacacaggccctgacaaatatcagtgttcctgccctgaggggtattcaggacccaactgtgaaattgctgagcacgcctgcctctctgatccctgtcacaacagaggcagctgtaaggagacctccctgggctttgagtgtgagtgttccccaggctggaccggccccacatgctctacaaacattgatgactgttctcctaataactgttcccacgggggcacctgccaggacctggttaacggatttaagtgtgtgtgccccccacagtggactgggaaaacgtgccagttagatgcaaatgaatgtgaggccaaaccttgtgtaaacgccaaatcctgtaagaatctcattgccagctactactgcgactgtcttcccggctggatgggtcagaattgtgacataaatattaatgactgccttggccagtgtcagaatgacgcctcctgtcggctggacatcgattattgtgagcctaatccctgccagaacggtgcccagtgctacaaccgtgccagtgactatttctgcaagtgccccgaggactatgagggcaagaactgctcacacctgaaagaccactgccgcacgaccccctgtgaagtgattgacagctgcacagtggccatggcttccaacgacacacctgaaggggtgcggtatatttcctccaacgtctgtggtcctcacgggaagtgcaagagtcagtcgggaggcaaattcacctgtgactgtaacaaaggcttcacgggaacatactgccatgaaaatattaatgactgtgagagcaacccttgtagaaacggtggcacttgcatcgatggtgtcaactcctacaagtgcatctgtagtgacggctgggagggggcctactgtgaaaccaatattaatgactgcagccagaacccctgccacaatgggggcacgtgtcgcgacctggtcaatgacttctactgtgactgtaaaaatgggtggaaaggaaagacctgccactcacgtgacagtcagtgtgatgaggccacgtgcaacaacggtggcacctgctatgatgagggggatgcttttaagtgcatgtgtcctggcggctgggaaggaacaacctgtaacatagcccgaaacagtagctgcctgcccaacccctgccataatgggggcacatgtgtggtcaacggcgagtcctttacgtgcgtctgcaaggaaggctgggaggggcccatctgtgctcagaataccaatgactgcagccctcatccctgttacaacagcggcacctgtgtggatggagacaactggtaccggtgcgaatgtgccccgggttttgctgggcccgactgcagaataaacatcaatgaatgccagtcttcaccttgtgcctttggagcgacctgtgtggatgagatcaatggctaccggtgtgtctgccctccagggcacagtggtgccaagtgccaggaagtttcagggagaccttgcatcaccatggggagtgtgataccagatggggccaaatgggatgatgactgtaatacctgccagtgcctgaatggacggatcgcctgctcaaaggtctggtgtggccctcgaccttgcctgctccacaaagggcacagcgagtgccccagcgggcagagctgcatccccatcctggacgaccagtgcttcgtccacccctgcactggtgtgggcgagtgtcggtcttccagtctccagccggtgaagacaaagtgcacctctgactcctattaccaggataactgtgcgaacatcacatttacctttaacaaggagatgatgtcaccaggtcttactacggagcacatttgcagtgaattgaggaatttgaatattttgaagaatgtttccgctgaatattcaatctacatcgcttgcgagccttccccttcagcgaacaatgaaatacatgtggccatttctgctgaagatatacgggatgatgggaacccgatcaaggaaatcactgacaaaataatcgatcttgttagtaaacgtgatggaaacagctcgctgattgctgccgttgcagaagtaagagttcagaggcggcctctgaagaacagaacagatttccttgttcccttgctgagctctgtcttaactgtggcttggatctgttgcttggtgacggccttctactggtgcctgcggaagcggcggaagccgggcagccacacacactcagcctctgaggacaacaccaccaacaacgtgcgggagcagctgaaccagatcaaaaaccccattgagaaacatggggccaacacggtccccatcaaggattacgagaacaagaactccaaaatgtctaaaataaggacacacaattctgaagtagaagaggacgacatggacaaacaccagcagaaagcccggtttgccaagcagccggcgtatacgctggtagacagagaagagaagccccccaacggcacgccgacaaaacacccaaactggacaaacaaacaggacaacagagacttggaaagtgcccagagcttaaaccgaatggagtacatcgtatag

SEQ ID NO: 367 - DNA, 3540 bp, Artificial sequence
  A novel predicted alternative spliced variant
atgcgttccccacggacgcgcggccggtccgggcgccccctaagcctcctgctcgccctgctctgtgccctgcgagccaaggtgtgtggggcctcgggtcagttcgagttggagatcctgtccatgcagaacgtgaacggggagctgcagaacgggaactgctgcggcggcgcccggaacccgggagaccgcaagtgcacccgcgacgagtgtgacacatacttcaaagtgtgcctcaaggagtatcagtcccgcgtcacggccggggggccctgcagcttcggctcagggtccacgcctgtcatcgggggcaacaccttcaacctcaaggccagccgcggcaacgaccgcaaccgcatcgtgctgcctttcagtttcgcctggccgaggtcctatacgttgcttgtggaggcgtgggattccagtaatgacaccgttcaacctgacagtattattgaaaaggcttctcactcgggcatgatcaaccccagccggcagtggcagacgctgaagcagaacacgggcgttgcccactttgagtatcagatccgcgtgacctgtgatgactactactatggctttggctgcaataagttctgccgccccagagatgacttctttggacactatgcctgtgaccagaatggcaacaaaacttgcatggaaggctggatgggccccgaatgtaacagagctatttgccgacaaggctgcagtcctaagcatgggtcttgcaaactcccaggtgactgcaggtgccagtatggctggcaaggcctgtactgtgataagtgcatcccacacccgggatgcgtccacggcatctgtaatgagccctggcagtgcctctgtgagaccaactggggcggccagctctgtgacaaagatctcaattactgtgggactcatcagccgtgtctcaacgggggaacttgtagcaacacaggccctgacaaatatcagtgttcctgccctgaggggtattcaggacccaactgtgaaattgctgagcacgcctgcctctctgatccctgtcacaacagaggcagctgtaaggagacctccctgggctttgagtgtgagtgttccccaggctggaccggccccacatgctctacaaacattgatgactgttctcctaataactgttcccacgggggcacctgccaggacctggttaacggatttaagtgtgtgtgccccccacagtggactgggaaaacgtgccagttagatgcaaatgaatgtgaggccaaaccttgtgtaaacgccaaatcctgtaagaatctcattgccagctactactgcgactgtcttcccggctggatgggtcagaattgtgacataaatattaatgactgccttggccagtgtcagaatgacgcctcctgtcgggatttggttaatggttatcgctgtatctgtccacctggctatgcaggcgatcactgtgagagagacatcgatgaatgtgccagcaacccctgtttgaatgggggtcactgtcagaatgaaatcaacagattccagtgtctgtgtcccactggtttctctggaaacctctgtcagctggacatcgattattgtgagcctaatccctgccagaacggtgcccagtgctacaaccgtgccagtgactatttctgcaagtgccccgaggactatgagggcaagaactgctcacacctgaaagaccactgccgcacgaccccctgtgaagtgattgacagctgcacagtggccatggcttccaacgacacacctgaaggggtgcggtatatttcctccaacgtctgtggtcctcacgggaagtgcaagagtcagtcgggaggcaaattcacctgtgactgtaacaaaggcttcacgggaacatactgccatgaaaatattaatgactgtgagagcaacccttgtagaaacggtggcacttgcatcgatggtgtcaactcctacaagtgcatctgtagtgacggctgggagggggcctactgtgaaaccaatattaatgactgcagccagaacccctgccacaatgggggcacgtgtcgcgacctggtcaatgacttctactgtgactgtaaaaatgggtggaaaggaaagacctgccactcacgtgacagtcagtgtgatgaggccacgtgcaacaacggtggcacctgctatgatgagggggatgcttttaagtgcatgtgtcctggcggctgggaaggaacaacctgtaacatagataccaatgactgcagccctcatccctgttacaacagcggcacctgtgtggatggagacaactggtaccggtgcgaatgtgccccgggttttgctgggcccgactgcagaataaacatcaatgaatgccagtcttcaccttgtgcctttggagcgacctgtgtggatgagatcaatggctaccggtgtgtctgccctccagggcacagtggtgccaagtgccaggaagtttcagggagaccttgcatcaccatggggagtgtgataccagatggggccaaatgggatgatgactgtaatacctgccagtgcctgaatggacggatcgcctgctcaaaggtctggtgtggccctcgaccttgcctgctccacaaagggcacagcgagtgccccagcgggcagagctgcatccccatcctggacgaccagtgcttcgtccacccctgcactggtgtgggcgagtgtcggtcttccagtctccagccggtgaagacaaagtgcacctctgactcctattaccaggataactgtgcgaacatcacatttacctttaacaaggagatgatgtcaccaggtcttactacggagcacatttgcagtgaattgaggaatttgaatattttgaagaatgtttccgctgaatattcaatctacatcgcttgcgagccttccccttcagcgaacaatgaaatacatgtggccatttctgctgaagatatacgggatgatgggaacccgatcaaggaaatcactgacaaaataatcgatcttgttagtaaacgtgatggaaacagctcgctgattgctgccgttgcagaagtaagagttcagaggcggcctctgaagaacagaacagatttccttgttcccttgctgagctctgtcttaactgtggcttggatctgttgcttggtgacggccttctactggtgcctgcggaagcggcggaagccgggcagccacacacactcagcctctgaggacaacaccaccaacaacgtgcgggagcagctgaaccagatcaaaaaccccattgagaaacatggggccaacacggtccccatcaaggattacgagaacaagaactccaaaatgtctaaaataaggacacacaattctgaagtagaagaggacgacatggacaaacaccagcagaaagcccggtttgccaagcagccggcgtatacgctggtagacagagaagagaagccccccaacggcacgccgacaaaacacccaaactggacaaacaaacaggacaacagagacttggaaagtgcccagagcttaaaccgaatggagtacatcgtatag

SEQ ID NO: 368 - DNA, 3547 bp, Artificial sequence
  A novel predicted alternative spliced variant
atgcgttccccacggacgcgcggccggtccgggcgccccctaagcctcctgctcgccctgctctgtgccctgcgagccaaggtgtgtggggcctcgggtcagttcgagttggagatcctgtccatgcagaacgtgaacggggagctgcagaacgggaactgctgcggcggcgcccggaacccgggagaccgcaagtgcacccgcgacgagtgtgacacatacttcaaagtgtgcctcaaggagtatcagtcccgcgtcacggccggggggccctgcagcttcggctcagggtccacgcctgtcatcgggggcaacaccttcaacctcaaggccagccgcggcaacgaccgcaaccgcatcgtgctgcctttcagtttcgcctggccgaggtcctatacgttgcttgtggaggcgtgggattccagtaatgacaccgttcaacctgacagtattattgaaaaggcttctcactcgggcatgatcaaccccagccggcagtggcagacgctgaagcagaacacgggcgttgcccactttgagtatcagatccgcgtgacctgtgatgactactactatggctttggctgcaataagttctgccgccccagagatgacttctttggacactatgcctgtgaccagaatggcaacaaaacttgcatggaaggctggatgggccccgaatgtaacagagctatttgccgacaaggctgcagtcctaagcatgggtcttgcaaactcccaggtgactgcaggtgccagtatggctggcaaggcctgtactgtgataagtgcatcccacacccgggatgcgtccacggcatctgtaatgagccctggcagtgcctctgtgagaccaactggggcggccagctctgtgacaaagatctcaattactgtgggactcatcagccgtgtctcaacgggggaacttgtagcaacacaggccctgacaaatatcagtgttcctgccctgaggggtattcaggacccaactgtgaaattgctgagcacgcctgcctctctgatccctgtcacaacagaggcagctgtaaggagacctccctgggctttgagtgtgagtgttccccaggctggaccggccccacatgctctacaaacattgatgactgttctcctaataactgttcccacgggggcacctgccaggacctggttaacggatttaagtgtgtgtgccccccacagtggactgggaaaacgtgccagttagatgcaaatgaatgtgaggccaaaccttgtgtaaacgccaaatcctgtaagaatctcattgccagctactactgcgactgtcttcccggctggatgggtcagaattgtgacataaatattaatgactgccttggccagtgtcagaatgacgcctcctgtcgggatttggttaatggttatcgctgtatctgtccacctggctatgcaggcgatcactgtgagagagacatcgatgaatgtgccagcaacccctgtttgaatgggggtcactgtcagaatgaaatcaacagattccagtgtctgtgtcccactggtttctctggaaacctctgtcagctggacatcgattattgtgagcctaatccctgccagaacggtgcccagtgctacaaccgtgccagtgactatttctgcaagtgccccgaggactatgagggcaagaactgctcacacctgaaagaccactgccgcacgaccccctgtgaagtgattgacagctgcacagtggccatggcttccaacgacacacctgaaggggtgcggtatatttcctccaacgtctgtggtcctcacgggaagtgcaagagtcagtcgggaggcaaattcacctgtgactgtaacaaaggcttcacgggaacatactgccatgaaaatattaatgactgtgagagcaacccttgtagaaacggtggcacttgcatcgatggtgtcaactcctacaagtgcatctgtagtgacggctgggagggggcctactgtgaaaccaatattaatgactgcagccagaacccctgccacaatgggggcacgtgtcgcgacctggtcaatgacttctactgtgactgtaaaaatgggtggaaaggaaagacctgccactcacgtgacagtcagtgtgatgaggccacgtgcaacaacggtggcacctgctatgatgagggggatgcttttaagtgcatgtgtcctggcggctgggaaggaacaacctgtaacatagcccgaaacagtagctgcctgcccaacccctgccataatgggggcacatgtgtggtcaacggcgagtcctttacgtgcgtctgcaaggaaggctgggaggggcccatctgtgctcagaataccaatgactgcagccctcatccctgttacaacagcggcacctgtgtggatggagacaactggtaccggtgcgaatgtgccccgggttttgctgggcccgactgcagaataaacatcaatgaatgccagtcttcaccttgtgcctttggagcgacctgtgtggatgagatcaatggctaccggtgtgtctgccctccagggcacagtggtgccaagtgccaggaaggtctggtgtggccctcgaccttgcctgctccacaaagggcacagcgagtgccccagcgggcagagctgcatccccatcctggacgaccagtgcttcgtccacccctgcactggtgtgggcgagtgtcggtcttccagtctccagccggtgaagacaaagtgcacctctgactcctattaccaggataactgtgcgaacatcacatttacctttaacaaggagatgatgtcaccaggtcttactacggagcacatttgcagtgaattgaggaatttgaatattttgaagaatgtttccgctgaatattcaatctacatcgcttgcgagccttccccttcagcgaacaatgaaatacatgtggccatttctgctgaagatatacgggatgatgggaacccgatcaaggaaatcactgacaaaataatcgatcttgttagtaaacgtgatggaaacagctcgctgattgctgccgttgcagaagtaagagttcagaggcggcctctgaagaacagaacagatttccttgttcccttgctgagctctgtcttaactgtggcttggatctgttgcttggtgacggccttctactggtgcctgcggaagcggcggaagccgggcagccacacacactcagcctctgaggacaacaccaccaacaacgtgcgggagcagctgaaccagatcaaaaaccccattgagaaacatggggccaacacggtccccatcaaggattacgagaacaagaactccaaaatgtctaaaataaggacacacaattctgaagtagaagaggacgacatggacaaacaccagcagaaagcccggtttgccaagcagccggcgtatacgctggtagacagagaagagaagccccccaacggcacgccgacaaaacacccaaactggacaaacaaacaggacaacagagacttggaaagtgcccagagcttaaaccgaatggagtacatcgtatag

SEQ ID NO: 369 - DNA, 7302 bp, Artificial sequence
  A novel predicted alternative spliced variant
atgcccgccctgcgccccgctctgctgtgggcgctgctggcgctctggctgtgctgcgcggcccccgcgcatgcattgcagtgtcgagatggctatgaaccctgtgtaaatgaaggaatgtgtgttacctaccacaatggcacaggatactgcaaatgtccagaaggcttcttgggggaatattgtcaacatcgagacccctgtgagaagaaccgctgccagaatggtgggacttgtgtggcccaggccatgctggggaaagccacgtgccgatgtgcctcagggtttacaggagaggactgccagtactcaacatctcatccatgctttgtgtctcgaccctgcctgaatggcggcacatgccatatgctcagccgggatacctatgagtgcacctgtcaagtcgggtttacaggtaaggagtgccaatggacggatgcctgcctgtctcatccctgtgcaaatggaagtacctgtaccactgtggccaaccagttctcctgcaaatgcctcacaggcttcacagggcagaaatgtgagactgatgtcaatgagtgtgacattccaggacactgccagcatggtggcacctgcctcaacctgcctggttcctaccagtgccagtgccctcagggcttcacaggccagtactgtgacagcctgtatgtgccctgtgcaccctcaccttgtgtcaatggaggcacctgtcggcagactggtgacttcacttttgagtgcaactgccttccaggttttgaagggagcacctgtgagaggaatattgatgactgccctaaccacaggtgtcagaatggaggggtttgtgtggatggggtcaacacttacaactgccgctgtcccccacaatggacaggacagttctgcacagaggatgtggatgaatgcctgctgcagcccaatgcctgtcaaaatgggggcacctgtgccaaccgcaatggaggctatggctgtgtatgtgtcaacggctggagtggagatgactgcagtgagaacattgatgattgtgccttcgcctcctgtactccaggctccacctgcatcgaccgtgtggcctccttctcttgcatgtgcccagaggggaaggcaggtctcctgtgtcatctggatgatgcatgcatcagcaatccttgccacaagggggcactgtgtgacaccaaccccctaaatgggcaatatatttgcacctgcccacaaggctacaaaggggctgactgcacagaagatgtggatgaatgtgccatggccaatagcaatccttgtgagcatgcaggaaaatgtgtgaacacggatggcgccttccactgtgagtgtctgaagggttatgcaggacctcgttgtgagatggacatcaatgagtgccattcagacccctgccagaatgatgctacctgtctggataagattggaggcttcacatgtctgtgcatgccaggtttcactgggccagtttgccagattgatattgatgactgttccagtactccgtgtctgaatggggcaaagtgtatcgatcacccgaatggctatgaatgccagtgtgccacaggtttcactggtgtgttgtgtgaggagaacattgacaactgtgaccccgatccttgccaccatggtcagtgtcaggatggtattgattcctacacctgcatctgcaatcccgggtacatgggcgccatctgcagtgaccagattgatgaatgttacagcagcccttgcctgaacgatggtcgctgcattgacctggtcaatggctaccagtgcaactgccagccaggcacgtcaggggttaattgtgaaattaattttgatgactgtgcaagtaacccttgtatccatggaatctgtatggatggcattaatcgctacagttgtgtctgctcaccaggattcacagggcagagatgtaacattgacattgatgagtgtgcctccaatccctgtcgcaagggtgcaacatgtatcaacggtgtgaatggtttccgctgtatatgccccgagggaccccatcaccccagctgctactcacaggtgaacgaatgcctgagcaatccctgcatccatggaaactgtactggaggtctcagtggatataagtgtctctgtgatgcaggctgggttggcatcaactgtgaagtggacaaaaatgaatgcctttcgaatccatgccagaatggaggaacttgtgacaatctggtgaatggatacaggtgtacttgcaagaagggctttaaaggctataactgccaggtgaatattgatgaatgtgcctcaaatccatgcctgaaccaaggaacctgctttgatgacataagtggctacacttgccactgtgtgctgccatacacaggcaagaattgtcagacagtattggctccctgttccccaaacccttgtgagaatgctgctgtttgcaaagagtcaccaaattttgagagttatacttgcttgtgtgctcctggctggcaaggtcagcggtgtaccattgacattgacgagtgtatctccaagccctgcatgaaccatggtctctgccataacacccagggcagctacatgtgtgaatgtccaccaggcttcagtggtatggactgtgaggaggacattgatgactgccttgccaatccttgccagaatggaggttcctgtatggatggagtgaatactttctcctgcctctgccttccgggtttcactggggataagtgccagacagacatgaatgagtgtctgagtgaaccctgtaagaatggagggacctgctctgactacgtcaacagttacacttgcaagtgccaggcaggatttgatggagtccattgtgagaacaacatcaatgagtgcactgagagctcctgtttcaatggtggcacatgtgttgatgggattaactccttctcttgcttgtgccctgtgggtttcactggatccttctgcctccatgagatcaatgaatgcagctctcatccatgcctgaatgagggaacgtgtgttgatggcctgggtacctaccgctgcagctgccccctgggctacactgggaaaaactgtcagaccctggtgaatctctgcagtcggtctccatgtaaaaacaaaggtacttgcgttcagaaaaaagcagagtcccagtgcctatgtccatctggatgggctggtgcctattgtgacgtgcccaatgtctcttgtgacatagcagcctccaggagaggtgtgcttgttgaacacttgtgccagcactcaggtgtctgcatcaatgctggcaacacgcattactgtcagtgccccctgggctatactgggagctactgtgaggagcaactcgatgagtgtgcgtccaacccctgccagcacggggcaacatgcagtgacttcattggtggatacagatgcgagtgtgtcccaggctatcagggtgtcaactgtgagtatgaagtggatgagtgccagaatcagccctgccagaatggaggcacctgtattgaccttgtgaaccatttcaagtgctcttgcccaccaggcactcggggcctactctgtgaagagaacattgatgactgtgcccggggtccccattgccttaatggtggtcagtgcatggataggattggaggctacagttgtcgctgcttgcctggctttgctggggagcgttgtgagggagacatcaacgagtgcctctccaacccctgcagctctgagggcagcctggactgtatacagctcaccaatgactacctgtgtgtttgccgtagtgcctttactggccggcactgtgaaaccttcgtcgatgtgtgtccccagatgccctgcctgaatggagggacttgtgctgtggccagtaacatgcctgatggtttcatttgccgttgtcccccgggattttccggggcaaggtgccagagcagctgtggacaagtgaaatgtaggaagggggagcagtgtgtgcacaccgcctctggaccccgctgcttctgccccagtccccgggactgcgagtcaggctgtgccagtagcccctgccagcacgggggcagctgccaccctcagcgccagcctccttattactcctgccagtgtgccccaccattctcgggtagccgctgtgaactctacacggcaccccccagcacccctcctgccacctgtctgagccagtattgtgccgacaaagctcgggatggcgtctgtgatgaggcctgcaacagccatgcctgccagtgggatgggggtgactgttctctcaccatggagaacccctgggccaactgctcctccccacttccctgctgggattatatcaacaaccagtgtgatgagctgtgcaacacggtcgagtgcctgtttgacaactttgaatgccaggggaacagcaagacatgcaagtatgacaaatactgtgcagaccacttcaaagacaaccactgtgaccaggggtgcaacagtgaggagtgtggttgggatgggctggactgtgctgctgaccaacctgagaacctggcagaaggtaccctggttattgtggtattgatgccacctgaacaactgctccaggatgctcgcagcttcttgcgggcactgggtaccctgctccacaccaacctgcgcattaagcgggactcccagggggaactcatggtgtacccctattatggtgagaagtcagctgctatgaagaaacagaggatgacacgcagatcccttcctggtgaacaagaacaggaggtggctggctctaaagtctttctggaaattgacaaccgccagtgtgttcaagactcagaccactgcttcaagaacacggatgcagcagcagctctcctggcctctcacgccatacaggggaccctgtcataccctcttgtgtctgtcgtcagtgaatccctgactccagaacgcactcagctcctctatctccttgctgttgctgttgtcatcattctgtttattattctgctgggggtaatcatggcaaaacgaaagcgtaagcatggctctctctggctgcctgaaggtttcactcttcgccgagatgcaagcaatcacaagcgtcgtgagccagtgggacaggatgctgtggggctgaaaaatctctcagtgcaagtctcagaagctaacctaattggtactggaacaagtgaacactgggtcgatgatgaagggccccagccaaagaaagtaaaggctgaagatgaggccttactctcagaagaagatgaccccattgatcgacggccatggacacagcagcaccttgaagctgcagacatccgtaggacaccatcgctggctctcacccctcctcaggcagagcaggaggtggatgtgttagatgtgaatgtccgtggcccagatggctgcaccccattgatgttggcttctctccgaggaggcagctcagatttgagtgatgaagatgaagatgcagaggactcttctgctaacatcatcacagacttggtctaccagggtgccagcctccaggcccagacagaccggactggtgagatggccctgcaccttgcagcccgctactcacgggctgatgctgccaagcgtctcctggatgcaggtgcagatgccaatgcccaggacaacatgggccgctgtccactccatgctgcagtggcagctgatgcccaaggtgtcttccagattctgattcgcaaccgagtaactgatctagatgccaggatgaatgatggtactacacccctgatcctggctgcccgcctggctgtggagggaatggtggcagaactgatcaactgccaagcggatgtgaatgcagtggatgaccatggaaaatctgctcttcactgggcagctgctgtcaataatgtggaggcaactcttttgttgttgaaaaatggggccaaccgagacatgcaggacaacaaggaagagacacctctgtttcttgctgcccgggaggggagctatgaagcagccaagatcctgttagaccattttgccaatcgagacatcacagaccatatggatcgtcttccccgggatgtggctcgggatcgcatgcaccatgacattgtgcgccttctggatgaatacaatgtgaccccaagccctccaggcaccgtgttgacttctgctctctcacctgtcatctgtgggcccaacagatctttcctcagcctgaagcacaccccaatgggcaagaagtctagacggcccagtgccaagagtaccatgcctactagcctccctaaccttgccaaggaggcaaaggatgccaagggtagtaggaggaagaagtctctgagtgagaaggtccaactgtctgagagttcagtaactttatcccctgttgattccctagaatctcctcacacgtatgtttccgacaccacatcctctccaatgattacatcccctgggatcttacaggcctcacccaaccctatgttggccactgccgcccctcctgccccagtccatgcccagcatgcactatctttttctaaccttcatgaaatgcagcctttggcacatggggccagcactgtgcttccctcagtgagccagttgctatcccaccaccacattgtgtctccaggcagtggcagtgctggaagcttgagtaggctccatccagtcccagtcccagcagattggatgaaccgcatggaggtgaatgagacccagtacaatgagatgtttggtatggtcctggctccagctgagggcacccatcctggcatagctccccagagcaggccacctgaagggaagcacataaccacccctcgggagcccttgccccccattgtgactttccagctcatccctaaaggcagtattgcccaaccagcgggggctccccagcctcagtccacctgccctccagctgttgcgggccccctgcccaccatgtaccagattccagaaatggcccgtttgcccagtgtggctttccccactgccatgatgccccagcaggacgggcaggtagctcagaccattctcccagcctatcatcctttcccagcctctgtgggcaagtaccccacacccccttcacagcacagttatgcttcctcaaatgctgctgagcgaacacccagtcacagtggtcacctccagggtgagcatccctacctgacaccatccccagagtctcctgaccagtggtcaagttcatcaccccactctgcttctgactggtcagatgtgaccaccagccctacccctgggggtgctggaggaggtcagcggggacctgggacacacatgtctgagccaccacacaacaacatgcaggtttatgcgtga

SEQ ID NO: 370 - DNA, 7305 bp, Artificial sequence
  A novel predicted alternative spliced variant
atgcccgccctgcgccccgctctgctgtgggcgctgctggcgctctggctgtgctgcgcggcccccgcgcatgcattgcagtgtcgagatggctatgaaccctgtgtaaatgaaggaatgtgtgttacctaccacaatggcacaggatactgcaaatgtccagaaggcttcttgggggaatattgtcaacatcgagacccctgtgagaagaaccgctgccagaatggtgggacttgtgtggcccaggccatgctggggaaagccacgtgccgatgtgcctcagggtttacaggagaggactgccagtactcaacatctcatccatgctttgtgtctcgaccctgcctgaatggcggcacatgccatatgctcagccgggatacctatgagtgcacctgtcaagtcgggtttacaggtaaggagtgccaatggacggatgcctgcctgtctcatccctgtgcaaatggaagtacctgtaccactgtggccaaccagttctcctgcaaatgcctcacaggcttcacagggcagaaatgtgagactgatgtcaatgagtgtgacattccaggacactgccagcatggtggcacctgcctcaacctgcctggttcctaccagtgccagtgccctcagggcttcacaggccagtactgtgacagcctgtatgtgccctgtgcaccctcaccttgtgtcaatggaggcacctgtcggcagactggtgacttcacttttgagtgcaactgccttccaggttttgaagggagcacctgtgagaggaatattgatgactgccctaaccacaggtgtcagaatggaggggtttgtgtggatggggtcaacacttacaactgccgctgtcccccacaatggacaggacagttctgcacagaggatgtggatgaatgcctgctgcagcccaatgcctgtcaaaatgggggcacctgtgccaaccgcaatggaggctatggctgtgtatgtgtcaacggctggagtggagatgactgcagtgagaacattgatgattgtgccttcgcctcctgtactccaggctccacctgcatcgaccgtgtggcctccttctcttgcatgtgcccagaggggaaggcaggtctcctgtgtcatctggatgatgcatgcatcagcaatccttgccacaagggggcactgtgtgacaccaaccccctaaatgggcaatatatttgcacctgcccacaaggctacaaaggggctgactgcacagaagatgtggatgaatgtgccatggccaatagcaatccttgtgagcatgcaggaaaatgtgtgaacacggatggcgccttccactgtgagtgtctgaagggttatgcaggacctcgttgtgagatggacatcaatgagtgccattcagacccctgccagaatgatgctacctgtctggataagattggaggcttcacatgtctgtgcatgccaggtttcaaaggtgtgcattgtgaattagaaataaatgaatgtcagagcaacccttgtgtgaacaatgggcagtgtgtggataaagtcaatcgtttccagtgcctgtgtcctcctggtttcactgggccagtttgccagattgatattgatgactgttccagtactccgtgtctgaatggggcaaagtgtatcgatcacccgaatggctatgaatgccagtgtgccacaggtttcactggtgtgttgtgtgaggagaacattgacaactgtgaccccgatccttgccaccatggtcagtgtcaggatggtattgattcctacacctgcatctgcaatcccgggtacatgggcgccatctgcagtgaccagattgatgaatgttacagcagcccttgcctgaacgatggtcgctgcattgacctggtcaatggctaccagtgcaactgccagccaggcacgtcagggcagagatgtaacattgacattgatgagtgtgcctccaatccctgtcgcaagggtgcaacatgtatcaacggtgtgaatggtttccgctgtatatgccccgagggaccccatcaccccagctgctactcacaggtgaacgaatgcctgagcaatccctgcatccatggaaactgtactggaggtctcagtggatataagtgtctctgtgatgcaggctgggttggcatcaactgtgaagtggacaaaaatgaatgcctttcgaatccatgccagaatggaggaacttgtgacaatctggtgaatggatacaggtgtacttgcaagaagggctttaaaggctataactgccaggtgaatattgatgaatgtgcctcaaatccatgcctgaaccaaggaacctgctttgatgacataagtggctacacttgccactgtgtgctgccatacacaggcaagaattgtcagacagtattggctccctgttccccaaacccttgtgagaatgctgctgtttgcaaagagtcaccaaattttgagagttatacttgcttgtgtgctcctggctggcaaggtcagcggtgtaccattgacattgacgagtgtatctccaagccctgcatgaaccatggtctctgccataacacccagggcagctacatgtgtgaatgtccaccaggcttcagtggtatggactgtgaggaggacattgatgactgccttgccaatccttgccagaatggaggttcctgtatggatggagtgaatactttctcctgcctctgccttccgggtttcactggggataagtgccagacagacatgaatgagtgtctgagtgaaccctgtaagaatggagggacctgctctgactacgtcaacagttacacttgcaagtgccaggcaggatttgatggagtccattgtgagaacaacatcaatgagtgcactgagagctcctgtttcaatggtggcacatgtgttgatgggattaactccttctcttgcttgtgccctgtgggtttcactggatccttctgcctccatgagatcaatgaatgcagctctcatccatgcctgaatgagggaacgtgtgttgatggcctgggtacctaccgctgcagctgccccctgggctacactgggaaaaactgtcagaccctggtgaatctctgcagtcggtctccatgtaaaaacaaaggtacttgcgttcagaaaaaagcagagtcccagtgcctatgtccatctggatgggctggtgcctattgtgacgtgcccaatgtctcttgtgacatagcagcctccaggagaggtgtgcttgttgaacacttgtgccagcactcaggtgtctgcatcaatgctggcaacacgcattactgtcagtgccccctgggctatactgggagctactgtgaggagcaactcgatgagtgtgcgtccaacccctgccagcacggggcaacatgcagtgacttcattggtggatacagatgcgagtgtgtcccaggctatcagggtgtcaactgtgagtatgaagtggatgagtgccagaatcagccctgccagaatggaggcacctgtattgaccttgtgaaccatttcaagtgctcttgcccaccaggcactcggggcctactctgtgaagagaacattgatgactgtgcccggggtccccattgccttaatggtggtcagtgcatggataggattggaggctacagttgtcgctgcttgcctggctttgctggggagcgttgtgagggagacatcaacgagtgcctctccaacccctgcagctctgagggcagcctggactgtatacagctcaccaatgactacctgtgtgtttgccgtagtgcctttactggccggcactgtgaaaccttcgtcgatgtgtgtccccagatgccctgcctgaatggagggacttgtgctgtggccagtaacatgcctgatggtttcatttgccgttgtcccccgggattttccggggcaaggtgccagagcagctgtggacaagtgaaatgtaggaagggggagcagtgtgtgcacaccgcctctggaccccgctgcttctgccccagtccccgggactgcgagtcaggctgtgccagtagcccctgccagcacgggggcagctgccaccctcagcgccagcctccttattactcctgccagtgtgccccaccattctcgggtagccgctgtgaactctacacggcaccccccagcacccctcctgccacctgtctgagccagtattgtgccgacaaagctcgggatggcgtctgtgatgaggcctgcaacagccatgcctgccagtgggatgggggtgactgttctctcaccatggagaacccctgggccaactgctcctccccacttccctgctgggattatatcaacaaccagtgtgatgagctgtgcaacacggtcgagtgcctgtttgacaactttgaatgccaggggaacagcaagacatgcaagtatgacaaatactgtgcagaccacttcaaagacaaccactgtgaccaggggtgcaacagtgaggagtgtggttgggatgggctggactgtgctgctgaccaacctgagaacctggcagaaggtaccctggttattgtggtattgatgccacctgaacaactgctccaggatgctcgcagcttcttgcgggcactgggtaccctgctccacaccaacctgcgcattaagcgggactcccagggggaactcatggtgtacccctattatggtgagaagtcagctgctatgaagaaacagaggatgacacgcagatcccttcctggtgaacaagaacaggaggtggctggctctaaagtctttctggaaattgacaaccgccagtgtgttcaagactcagaccactgcttcaagaacacggatgcagcagcagctctcctggcctctcacgccatacaggggaccctgtcataccctcttgtgtctgtcgtcagtgaatccctgactccagaacgcactcagctcctctatctccttgctgttgctgttgtcatcattctgtttattattctgctgggggtaatcatggcaaaacgaaagcgtaagcatggctctctctggctgcctgaaggtttcactcttcgccgagatgcaagcaatcacaagcgtcgtgagccagtgggacaggatgctgtggggctgaaaaatctctcagtgcaagtctcagaagctaacctaattggtactggaacaagtgaacactgggtcgatgatgaagggccccagccaaagaaagtaaaggctgaagatgaggccttactctcagaagaagatgaccccattgatcgacggccatggacacagcagcaccttgaagctgcagacatccgtaggacaccatcgctggctctcacccctcctcaggcagagcaggaggtggatgtgttagatgtgaatgtccgtggcccagatggctgcaccccattgatgttggcttctctccgaggaggcagctcagatttgagtgatgaagatgaagatgcagaggactcttctgctaacatcatcacagacttggtctaccagggtgccagcctccaggcccagacagaccggactggtgagatggccctgcaccttgcagcccgctactcacgggctgatgctgccaagcgtctcctggatgcaggtgcagatgccaatgcccaggacaacatgggccgctgtccactccatgctgcagtggcagctgatgcccaaggtgtcttccagattctgattcgcaaccgagtaactgatctagatgccaggatgaatgatggtactacacccctgatcctggctgcccgcctggctgtggagggaatggtggcagaactgatcaactgccaagcggatgtgaatgcagtggatgaccatggaaaatctgctcttcactgggcagctgctgtcaataatgtggaggcaactcttttgttgttgaaaaatggggccaaccgagacatgcaggacaacaaggaagagacacctctgtttcttgctgcccgggaggggagctatgaagcagccaagatcctgttagaccattttgccaatcgagacatcacagaccatatggatcgtcttccccgggatgtggctcgggatcgcatgcaccatgacattgtgcgccttctggatgaatacaatgtgaccccaagccctccaggcaccgtgttgacttctgctctctcacctgtcatctgtgggcccaacagatctttcctcagcctgaagcacaccccaatgggcaagaagtctagacggcccagtgccaagagtaccatgcctactagcctccctaaccttgccaaggaggcaaaggatgccaagggtagtaggaggaagaagtctctgagtgagaaggtccaactgtctgagagttcagtaactttatcccctgttgattccctagaatctcctcacacgtatgtttccgacaccacatcctctccaatgattacatcccctgggatcttacaggcctcacccaaccctatgttggccactgccgcccctcctgccccagtccatgcccagcatgcactatctttttctaaccttcatgaaatgcagcctttggcacatggggccagcactgtgcttccctcagtgagccagttgctatcccaccaccacattgtgtctccaggcagtggcagtgctggaagcttgagtaggctccatccagtcccagtcccagcagattggatgaaccgcatggaggtgaatgagacccagtacaatgagatgtttggtatggtcctggctccagctgagggcacccatcctggcatagctccccagagcaggccacctgaagggaagcacataaccacccctcgggagcccttgccccccattgtgactttccagctcatccctaaaggcagtattgcccaaccagcgggggctccccagcctcagtccacctgccctccagctgttgcgggccccctgcccaccatgtaccagattccagaaatggcccgtttgcccagtgtggctttccccactgccatgatgccccagcaggacgggcaggtagctcagaccattctcccagcctatcatcctttcccagcctctgtgggcaagtaccccacacccccttcacagcacagttatgcttcctcaaatgctgctgagcgaacacccagtcacagtggtcacctccagggtgagcatccctacctgacaccatccccagagtctcctgaccagtggtcaagttcatcaccccactctgcttctgactggtcagatgtgaccaccagccctacccctgggggtgctggaggaggtcagcggggacctgggacacacatgtctgagccaccacacaacaacatgcaggtttatgcgtga

SEQ ID NO: 371 - DNA, 6887 bp, Artificial sequence
  A novel predicted alternative spliced variant
atggggccgggggcccgtggccgccgccgccgccgtcgcccgatgtcgccgccaccgccaccgccacccgtgcgggcgctgcccctgctgctgctgctagcggggccgggggctgcaggtgcccgcctggctgggtgggtgagcggtgtcagctggaggacccctgtcactcaggcccctgtgctggccgtggtgtctgccagagttcagtggtggctggcaccgcccgattctcatgccggtgcccccgtggcttccgaggccctgactgctccctgccagatccctgcctcagcagcccttgtgcccacggtgcccgctgctcagtggggcccgatggacgcttcctctgctcctgcccacctggctaccagggccgcagctgccgaagcgacgtggatgagtgccgggtgggtgagccctgccgccatggtggcacctgcctcaacacacctggctccttccgctgccagtgtccagctggctacacagggccactatgtgagaaccccgcggtgccctgtgcgccctcaccatgccgtaacgggggcacctgcaggcagagtggcgacctcacttacgactgtgcctgtcttcctgggtttgagggtcagaattgtgaagtgaacgtggacgactgtccaggacaccgatgtctcaatggggggacatgcgtggatggcgtcaacacctataactgccagtgccctcctgagtggacaggccagttctgcacggaggacgtggatgagtgtcagctgcagcccaacgcctgccacaatgggggtacctgcttcaacacgctgggtggccacagctgcgtgtgtgtcaatggctggacaggtgagagctgcagtcagaatatcgatgactgtgccacagccgtgtgcttccatggggccacctgccatgaccgcgtggcttctttctactgtgcctgccccatgggcaagactggcctcctgtgtcacctggatgacgcctgtgtcagcaacccctgccacgaggatgctatctgtgacacaaatccggtgaacggccgggccatttgcacctgtcctcccggcttcacgggtggggcatgtgaccaggatgtggacgagtgctctatcggcgccaacccctgcgagcacttgggcaggtgcgtgaacacgcagggctccttcctgtgccagtgcggtcgtggctacactggacctcgctgtgagaccgatgtcaacgagtgtctgtcggggccctgccgaaaccaggccacgtgcctcgaccgcataggccagttcacctgtatctgtatggcaggcttcacaggaacctattgcgaggtggacattgacgagtgtcagagtagcccctgtgtcaacggtggggtctgcaaggaccgagtcaatggcttcagctgcacctgcccctcgggcttcagcggctccacgtgtcagctggacgtggacgaatgcgccagcacgccctgcaggaatggcgccaaatgcgtggaccagcccgatggctacgagtgccgctgtgccgagggctttgagggcacgctgtgtgatcgcaacgtggacgactgctcccctgacccatgccaccatggtcgctgcgtggatggcatcgccagcttctcatgtgcctgtgctcctggctacacgggcacacgctgcgagagccaggtggacgaatgccgcagccagccctgccgccatggcggcaaatgcctagacctggtggacaagtacctctgccgctgcccttctgggaccacaggtgtgaactgcgaagtgaacattgacgactgtgccagcaacccctgcacctttggagtctgccgtgatggcatcaaccgctacgactgtgtctgccaacctggcttcacagggcccctttgtaacgtggagatcaatgagtgtgcttccagcccatgcggcgagggaggttcctgtgtggatggggaaaatggcttccgctgcctctgcccgcctggctccttgcccccactctgcctccccccgagccatccctgtgcccatgagccctgcagtcacggcatctgctatgatgcacctggcgggttccgctgtgtgtgtgagcctggctggagtggcccccgctgcagccagagcctggcccgagacgcctgtgagtcccagccgtgcagggccggtgggacatgcagcagcgatggaatgggtttccactgcacctgcccgcctggtgtccagggacgtcagtgtgaactcctctccccctgcaccccgaacccctgtgagcatgggggccgctgcgagtctgcccctggccagctgcctgtctgctcctgcccccagggctggcaaggcccacgatgccagcaggatgtggacgagtgtgctggccccgcaccctgtggccctcatggtatctgcaccaacctggcagggagtttcagctgcacctgccatggagggtacactggcccttcctgtgatcaggacatcaatgactgtgaccccaacccatgcctgaacggtggctcgtgccaagacggcgtgggctccttttcctgctcctgcctccctggtttcgccggcccacgatgcgcccgcgatgtggatgagtgcctgagcaacccctgcggcccgggcacctgtaccgaccacgtggcctccttcacctgcacctgcccgccgggctacggaggcttccactgcgaacaggacctgcccgactgcagccccagctcctgcttcaatggcgggacctgtgtggacggcgtgaactcgttcagctgcctgtgccgtcccggctacacaggagcccactgccaacatgaggcagacccctgcctctcgcggccctgcctacacgggggcgtctgcagcgccgcccaccctggcttccgctgcacctgcctcgagagcttcacgggcccgcagtgccagacgctggtggattggtgcagccgccagccttgtcaaaacgggggtcgctgcgtccagactggggcctattgcctttgtccccctggatggagcggacgcctctgtgacatccgaagcttgccctgcagggaggccgcagcccagatcggggtgcggctggagcagctgtgtcaggcgggtgggcagtgtgtggatgaagacagctcccactactgcgtgtgcccagagggccgtactggtagccactgtgagcaggaggtggacccctgcttggcccagccctgccagcatggggggacctgccgtggctatatggggggctacatgtgtgagtgtcttcctggctacaatggtgataactgtgaggacgacgtggacgagtgtgcctcccagccctgccagcacgggggttcatgcattgacctcgtggcccgctatctctgctcctgtcccccaggaacgctgggggtgctctgcgagattaatgaggatgactgcggcccaggcccaccgctggactcagggccccggtgcctacacaatggcacctgcgtggacctggtgggtggtttccgctgcacctgtcccccaggatacactggtttgcgctgcgaggcagacatcaatgagtgtcgctcaggtgcctgccacgcggcacacacccgggactgcctgcaggacccaggcggaggtttccgttgcctttgtcatgctggcttctcaggtcctcgctgtcagactgtcctgtctccctgcgagtcccagccatgccagcatggaggccagtgccgtcctagcccgggtcctgggggtgggctgaccttcacctgtcactgtgcccagccgttctggggtccgcgttgcgagcgggtggcgcgctcctgccgggagctgcagtgcccggtgggcgtcccatgccagcagacgccccgcgggccgcgctgcgcctgccccccagggttgtcgggaccctcctgccgcagcttcccggggtcgccgccgggggccagcaacgccagctgcgcggccgccccctgtctccacgggggctcctgccgccccgcgccgctcgcgcccttcttccgctgcgcttgcgcgcagggctggaccgggccgcgctgcgaggcgcccgccgcggcacccgaggtctcggaggagccgcggtgcccgcgcgccgcctgccaggccaagcgcggggaccagcgctgcgaccgcgagtgcaacagcccaggctgcggctgggacggcggcgactgctcgctgagcgtgggcgacccctggcggcaatgcgaggcgctgcagtgctggcgcctcttcaacaacagccgctgcgaccccgcctgcagctcgcccgcctgcctctacgacaacttcgactgccacgccggtggccgcgagcgcacttgcaacccggtgtacgagaagtactgcgccgaccactttgccgacggccgctgcgaccagggctgcaacacggaggagtgcggctgggatgggctggattgtgccagcgaggtgccggccctgctggcccgcggcgtgctggtgctcacagtgctgctgccgccggaggagctactgcgttccagcgccgactttctgcagcggctcagcgccatcctgcgcacctcgctgcgcttccgcctggacgcgcacggccaggccatggtcttcccttaccaccggcctagtcctggctccgaaccccgggcccgtcgggagctggcccccgaggtgatcggctcggtagtaatgctggagattgacaaccggctctgcctgcagtcgcctgagaatgatcactgcttccccgatgcccagagcgccgctgactacctgggagcgttgtcagcggtggagcgcctggacttcccgtacccactgcgggacgtgcggggggagccgctggagcctccagaacccagcgtcccgctgctgccactgctagtggcgggcgctgtcttgctgctggtcattctcgtcctgggtgtcatggtggcccggcgcaagcgcgagcacagcaccctctggttccctgagggcttctcactgcacaaggacgtggcctctggtcacaagggccggcgggaacccgtgggccaggacgcgctgggcatgaagaacatggccaagggtgagagcctgatgggggaggtggccacagactggatggacacagagtgcccagaggccaagcggctaaaggtagaggagccaggcatgggggctgaggaggctgtggattgccgtcagtggactcaacaccatctggttgctgctgacatccgcgtggcaccagccatggcactgacaccaccacagggcgacgcagatgctgatggcatggatgtcaatgtgcgtggcccagatggcttcaccccgctaatgctggcttccttctgtgggggggctctggagccaatgccaactgaagaggatgaggcagatgacacatcagctagcatcatctccgacctgatctgccagggggctcagcttggggcacggactgaccgtactggcgagactgctttgcacctggctgcccgttatgcccgtgctgatgcagccaagcggctgctggatgctggggcagacaccaatgcccaggaccactcaggccgcactcccctgcacacagctgtcacagccgatgcccagggtgtcttccagattctcatccgaaaccgctctacagacttggatgcccgcatggcagatggctcaacggcactgatcctggcggcccgcctggcagtagagggcatggtggaagagctcatcgccagccatgctgatgtcaatgctgtggatgagcttgggaaatcagccttacactgggctgcggctgtgaacaacgtggaagccactttggccctgctcaaaaatggagccaataaggacatgcaggatagcaaggaggagacccccctattcctggccgcccgcgagggcagctatgaggctgccaagctgctgttggaccactttgccaaccgtgagatcaccgaccacctggacaggctgccgcgggacgtagcccaggagagactgcaccaggacatcgtgcgcttgctggatcaacccagtgggccccgcagcccccccggtccccacggcctggggcctctgctctgtcctccaggggccttcctccctggcctcaaagcggcacagtcggggtccaagaagagcaggaggccccccgggaaggcggggctggggccgcaggggccccgggggcggggcaagaagctgacgctggcctgcccgggccccctggctgacagctcggtcacgctgtcgcccgtggactcgctggactccccgcggcctttcggtgggccccctgcttcccctggtggcttcccccttgaggggccctatgcagctgccactgccactgcagtgtctctggcacagcttggtggcccaggccgggcaggtctagggcgccagccccctggaggatgtgtactcagcctgggcctgctgaaccctgtggctgtgcccctcgattgggcccggctgcccccacctgcccctccaggcccctcgttcctgctgccactggcgccgggaccccagctgctcaacccagggacccccgtctccccgcaggagcggcccccgccttacctggcagtcccaggacatggcgaggagtacccggtggctggggcacacagcagccccccaaaggcccgcttcctgcgggttcccagtgagcacccttacctgaccccatcccccgaatcccctgagcactgggccagcccctcacctccctccctctcagactggtccgaatccacgcctagcccagccactgccactggggccatggccaccaccactggggcactgcctgcccagccacttcccttgtctgttcccagctcccttgctcaggcccagacccagctggggccccagccggaagttacccccaagaggcaagtgttggcctga

SEQ ID NO: 372 - DNA, 5814 bp, Artificial sequence
  A novel predicted alternative spliced variant
atgcagcccccttcactgctgctgctgctgctgctgctgctgctatgtgtctcagtggtcagacccagagggctgctgtgtgggagtttcccagaaccctgtgccaatggaggcacctgcctgagcctgtctctgggacaagggacctgccagtgtgcccctggcttcctgggtgagacgtgccagtttcctgacccctgccagaacgcccagctctgccaaaatggaggcagctgccaagccctgcttcccgctcccctagggctccccagctctccctctccattgacacccagcttcttgtgcacttgcctccctggcttcactggtgagagatgccaggccaagcttgaagacccttgtcctccctccttctgttccaaaaggggccgctgccacatccaggcctcgggccgcccacagtgctcctgcatgcctggatggacaggtgagcagtgccagcttcgggacttctgttcagccaacccatgtgttaatggaggggtgtgtctggccacgtacccccagatccagtgccactgcccaccgggcttcgagggccatgcctgtgaacgtgatgtcaacgagtgcttccaggacccaggaccctgccccaaaggcacctcctgccataacaccctgggctccttccagtgcctctgccctgtggggcaggagggtccacgttgtgagctgcgggcaggaccctgccctcctaggggctgttcgaatgggggcacctgccagctgatgccagagaaagactccacctttcacctctgcctctgtcccccaggtttcataggcccgggctgtgaggtgaatccagacaactgtgtcagccaccaatgtcagaatgggggcacttgccaggatgggctggacacctacacctgcctctgcccagaaacctggacaggctgggactgctccgaagatgtggatgagtgtgaggcccagggtccccctcactgcagaaacgggggcacctgccagaactctgctggtagctttcactgcgtgtgtgtgagtggctgggggggcacaagctgtgaggagaacctggatgactgtattgctgccacctgtgccccgggatccacctgcattgaccgggtgggctctttctcctgcctctgcccacctggacgcacaggactcctgtgccacttggaagacatgtgtctgagccagccgtgccatggggatgcccaatgcagcaccaaccccctcacaggctccacactctgcctgtgtcagcctggctattcggggcccacctgccaccaggacctggacgagtgtctgatgggcttagaagggcagctctgtgaggtggagaccaacgagtgtgcctcagctccctgcctgaaccacgcggattgccatgacctgctcaacggcttccagtgcatctgcctgcctggattctccggcacccgatgtgaggaggatatcgatgagtgcagaagctctccctgtgccaatggtgggcagtgccaggaccagcctggagccttccactgcaagtgtctcccaggctttgaagggccacgctgtcaaacagaggtggatgagtgcctgagtgacccatgtcccgttggagccagctgccttgatcttccaggagccttcttttgcctctgcccctctggtttcacaggccagctctgtgaggttcccctgtgtgctcccaacctgtgccagcccaagcagatatgtaaggaccagaaagacaaggccaactgcctctgtcctgatggaagccctggctgtgccccacctgaggacaactgcacctgccaccacgggcactgccagagatcctcatgtgtgtgtgacgtgggttggacggggccagagtgtgaggcagagctagggggctgcatctctgcaccctgtgcccatggggggacctgctacccccagccctctggctacaactgcacctgccctacaggctacacaggacccacctgtagtgaggagatgacagcttgtcactcagggccatgtctcaatggcggctcctgcaaccctagccctggaggctactactgcacctgccctccaagccacacagggccccagtgccaaaccagcactgactactgtgtgtctgccccgtgcttcaatgggggtacctgtgtgaacaggcctggcaccttctcctgcctctgtgccatgggcttccagggcccgcgctgtgagggaaagctccgccccagctgtgcagacagcccctgtaggaatagggcaacctgccaggacagccctcagggtccccgctgcctctgccccactggctacaccggaggcagctgccagactctgatggacttatgtgcccagaagccctgcccacgcaattcccactgcctccagactgggccctccttccactgcttgtgcctccagggatggaccgggcctctctgcaaccttccactgtcctcctgccagaaggctgcactgagccaaggcatagacgtctcttccctttgccacaatggaggcctctgtgtcgacagcggcccctcctatttctgccactgcccccctggattccaaggcagcctgtgccaggatcacgtgaacccatgtgagtccaggccttgccagaacggggccacctgcatggcccagcccagtgggtatctctgccagtgtgccccaggctacgatggacagaactgctcaaaggaactcgatgcttgtcagtcccaaccctgtcacaaccatggaacctgtactcccaaacctggaggcttccactgtgcctgccctccaggctttgtggggctacgctgtgagggagacgtggacgagtgtctggaccagccctgccaccccacaggcactgcagcctgccactctctggccaatgccttctactgccagtgtctgcctggacacacaggccagtggtgtgaggtggagatagacccctgccacagccaaccctgctttcatggagggacctgtgaggccacagcaggatcacccctgggtttcatctgccactgccccaagggttttgaaggccccacctgcagccacagggccccttcctgcggcttccatcactgccaccacggaggcctgtgtctgccctcccctaagccaggcttcccaccacgctgtgcctgcctcagtggctatgggggtcctgactgcctgaccccaccagctcctaaaggctgtggccctccctccccatgcctatacaatggcagctgctcagagaccacgggcttggggggcccaggctttcgatgctcctgccctcacagctctccagggccccggtgtcagaaacccggagccaaggggtgtgagggcagaagtggagatggggcctgcgatgctggctgcagtggcccgggaggaaactgggatggaggggactgctctctgggagtcccagacccctggaagggctgcccctcccactctcggtgctggcttctcttccgggacgggcagtgccacccacagtgtgactctgaagagtgtctgtttgatggctacgactgtgagacccctccagcctgcactccagcctatgaccagtactgccatgatcacttccacaacgggcactgtgagaaaggctgcaacactgcagagtgtggctgggatggaggtgactgcaggcctgaagatggggacccagagtgggggccctccctggccctgctggtggtactgagccccccagccctagaccagcagctgtttgccctggcccgggtgctgtccctgactctgagggtaggactctgggtaaggaaggatcgtgatggcagggacatggtgtacccctatcctggggcccgggctgaagaaaagctaggaggaactcgggaccccacctatcaggagagagcagcccctcaaacacagcccctgggcaaggagaccgactccctcagtgctgggtttgtggtggtcatgggtgtggatttgtcccgctgtggccctgaccacccggcatcccgctgtccctgggaccctgggcttctactccgcttccttgctgcgatggctgcagtgggagccctggagcccctgctgcctggaccactgctggctgtccaccctcatgcagggaccgcaccccctgccaaccagcttccctggcctgtgctgtgctccccagtggccggggtgattctcctggccctaggggctcttctcgtcctccagctcatccggcgtcgacgccgagagcatggagctctctggctgccccctggtttcactcgacggcctcggactcagtcagctccccaccgacgccggcccccactaggcgaggacagcattggtctcaaggcactgaagccaaaggcagaagttgatgaggatggagttgtgatgtgctcaggccctgaggagggagaggaggtgggccaggctgaagaaacaggcccaccctccacgtgccagctctggtctctgagtggtggctgtggggcgctccctcaggcagccatgctaactcctccccaggaatctgagatggaagcccctgacctggacacccgtggacctgatggggtgacacccctgatgtcagcagtttgctgtggggaagtacagtccgggaccttccaaggggcatggttgggatgtcctgagccctgggaacctctgctggatggaggggcctgtccccaggctcacaccgtgggcactggggagacccccctgcacctggctgcccgattctcccggccaaccgctgcccgccgcctccttgaggctggagccaaccccaaccagccagaccgggcagggcgcacaccccttcatgctgctgtggctgctgatgctcgggaggtctgccagcttctgctccgtagcagacaaactgcagtggacgctcgcacagaggacgggaccacacccttgatgctggctgccaggctggcggtggaagacctggttgaagaactgattgcagcccaagcagacgtgggggccagagataaatgggggaaaactgcgctgcactgggctgctgccgtgaacaacgcccgagccgcccgctcgcttctccaggccggagccgataaagatgcccaggacaacagggagcagacgccgctattcctggcggcgcgggaaggagcggtggaagtagcccagctactgctggggctgggggcagcccgagagctgcgggaccaggctgggctagcgccggcggacgtcgctcaccaacgtaaccactgggatctgctgacgctgctggaaggggctgggccaccagaggcccgtcacaaagccacgccgggccgcgaggctgggcccttcccgcgcgcacggacggtgtcagtaagcgtgcccccgcatgggggcggggctctgccgcgctgccggacgctgtcagccggagcaggccctcgtgggggcggagcttgtctgcaggctcggacttggtccgtagacttggctgcgcgggggggcggggcctattctcattgccggagcctctcgggagtaggagcaggaggaggcccgacccctcgcggccgtaggttttctgcaggcatgcgcgggcctcggcccaaccctgcgataatgcgaggaagatacggagtggctgccgggcgcggaggcagggtctcaacggatgactggccctgtgattgggtggccctgggagcttgcggttctgcctccaacattccgatcccgcctccttgccttactccgtccccggagcggggatcacctcaacttgactgtggtcccccagccctccaagaaatgcccataaaccaaggaggagagggtaaaaaatag

SEQ ID NO: 373 - DNA, 2328 bp, Artificial sequence
  A novel predicted alternative spliced variant
atgtcgtcctggataaggtggcatggacccgccatggcgcggctctggggcttctgctggctggttgtgggcttctggagggccgctttcgcctgtcccacgtcctgcaaatgcagtgcctctcggatctggtgcagcgacccttctcctggcatcgtggcatttccgagattggagcctaacagtgtagatcctgagaacatcaccgaaattttcatcgcaaaccagaaaaggttagaaatcatcaacgaagatgatgttgaagcttatgtgggactgagaaatctgacaattgtggattctggattaaaatttgtggctcataaagcatttctgaaaaacagcaacctgcagcacatcaattttacccgaaacaaactgacgagtttgtctaggaaacatttccgtcaccttgacttgtctgaactgatcctggtgggcaatccatttacatgctcctgtgacattatgtggatcaagactctccaagaggctaaatccagtccagacactcaggatttgtactgcctgaatgaaagcagcaagaatattcccctggcaaacctgcagatacccaattgtggtttgccatctgcaaatctggccgcacctaacctcactgtggaggaaggaaagtctatcacattatcctgtagtgtggcaggtgatccggttcctaatatgtattgggatgttggtaacctggtttccaaacatatgaatgaaacaagccacacacagggctccttaaggataactaacatttcatccgatgacagtgggaagcagatctcttgtgtggcggaaaatcttgtaggagaagatcaagattctgtcaacctcactgtgcattttgcaccaactatcacatttctcgaatctccaacctcagaccaccactggtgcattccattcactgtgaaaggcaaccccaaaccagcgcttcagtggttctataacggggcaatattgaatgagtccaaatacatctgtactaaaatacatgttaccaatcacacggagtaccacggctgcctccagctggataatcccactcacatgaacaatggggactacactctaatagccaagaatgagtatgggaaggatgagaaacagatttctgctcacttcatgggctggcctggaattgacgatggtgcaaacccaaattatcctgatgtaatttatgaagattatggaactgcagcgaatgacatcggggacaccacgaacagaagtaatgaaatcccttccacagacgtcactgataaaaccggtcgggaacatctctcggtctatgctgtggtggtgattgcgtctgtggtgggattttgccttttggtaatgctgtttctgcttaagttggcaagacactccaagtttggcatgaaagatttctcatggtttggatttgggaaagtaaaatcaagacaaggtgttgttgttcagcacatcaagcgacataacattgttctgaaaagggagctaggcgaaggagcctttggaaaagtgttcctagctgaatgctataacctctgtcctgagcaggacaagatcttggtggcagtgaagaccctgaaggatgccagtgacaatgcacgcaaggacttccaccgtgaggccgagctcctgaccaacctccagcatgagcacatcgtcaagttctatggcgtctgcgtggagggcgaccccctcatcatggtctttgagtacatgaagcatggggacctcaacaagttcctcagggcacacggccctgatgccgtgctgatggctgagggcaacccgcccacggaactgacgcagtcgcagatgctgcatatagcccagcagatcgccgcgggcatggtctacctggcgtcccagcacttcgtgcaccgcgatttggccaccaggaactgcctggtcggggagaacttgctggtgaaaatcggggactttgggatgtcccgggacgtgtacagcactgactactacagggtcggtggccacacaatgctgcccattcgctggatgcctccagagagcatcatgtacaggaaattcacgacggaaagcgacgtctggagcctgggggtcgtgttgtgggagattttcacctatggcaaacagccctggtaccagctgtcaaacaatgaggtgatagagtgtatcactcagggccgagtcctgcagcgaccccgcacgtgcccccaggaggtgtatgagctgatgctggggtgctggcagcgagagccccacatgaggaagaacatcaagggcatccataccctccttcagaacttggccaaggcatctccggtctacctggacattctaggctag

SEQ ID NO: 374 - DNA, 2409 bp, Artificial sequence
  A novel predicted alternative spliced variant
atggatgtctctctttgcccagccaagtgtagtttctggcggattttcttgctgggaagcgtctggctggactatgtgggctccgtgctggcttgccctgcaaattgtgtctgcagcaagactgagatcaattgccggcggccggacgatgggaacctcttccccctcctggaagggcaggattcagggaacagcaatgggaacgccagtatcaacatcacggacatctcaaggaatatcacttccatacacatagagaactggcgcagtcttcacacgctcaacgccgtggacatggagctctacaccggacttcaaaagctgaccatcaagaactcaggacttcggagcattcagcccagagcctttgccaagaacccccatttgcgttatatgcagttggagcagaactttttcaactgcagctgtgacatccgctggatgcagctctggcaggagcagggggaggccaagctcaacagccagaacctctactgcatcaacgctgatggctcccagcttcctctcttccgcatgaacatcagtcagtgtgaccttcctgagatcagcgtgagccacgtcaacctgaccgtacgagagggtgacaatgctgttatcacttgcaatggctctggatcaccccttcctgatgtggactggatagtcactgggctgcagtccatcaacactcaccagaccaatctgaactggaccaatgttcatgccatcaacttgacgctggtgaatgtgacgagtgaggacaatggcttcaccctgacgtgcattgcagagaacgtggtgggcatgagcaatgccagtgttgccctcactgtctactatcccccacgtgtggtgagcctggaggagcctgagctgcgcctggagcactgcatcgagtttgtggtgcgtggcaaccccccaccaacgctgcactggctgcacaatgggcagcctctgcgggagtccaagatcatccatgtggaatactaccaagagggagagatttccgagggctgcctgctcttcaacaagcccacccactacaacaatggcaactataccctcattgccaaaaacccactgggcacagccaaccagaccatcaatggccacttcctcaaggagccctttccagagagcacggataactttatcttgtttgacgaagtgagtcccacacctcctatcactgtgacccacaaaccagaagaagacacttttggggtatccatagcagttggacttgctgcttttgcctgtgtcctgttggtggttctcttcgtcatgatcaacaaatatggtcgacggtccaaatttggaatgaagggtcccgtggctgtcatcagtggtgaggaggactcagccagcccactgcaccacatcaaccacggcatcaccacgccctcgtcactggatgcggggcccgacactgtggtcattggcatgactcgcatccctgtcattgagaacccccagtacttccgtcagggacacaactgccacaagccggacacgtatgtgcagcacattaagaggagagacatcgtgctgaagcgagaactgggtgagggagcctttggaaaggtcttcctggccgagtgctacaacctcagcccgaccaaggacaagatgcttgtggctgtgaaggccctgaaggatcccaccctggctgcccggaaggatttccagagggaggccgagctgctcaccaacctgcagcatgagcacattgtcaagttctatggagtgtgcggcgatggggaccccctcatcatggtctttgaatacatgaagcatggagacctgaataagttcctcagggcccatgggccaaatgcaatgatccttgtggatggacagccacgccaggccaagggtgagctggggctctcccaaatgctccacattgccagtcagatcgcctcgggtatggtgtacctggcctcccagcactttgtgcaccgagacctggccaccaggaactgcctggttggagcgaatctgctagtgaagattggggacttcggcatgtccagagatgtctacagcacggattattacagggtgggaggacacaccatgctccccattcgctggatgcctcctgaaagcatcatgtaccggaagttcactacagagagtgatgtatggagcttcggggtgatcctctgggagatcttcacctatggaaagcagccatggttccaactctcaaacacggaggtcattgagtgcattacccaaggtcgtgttttggagcggccccgagtctgccccaaagaggtgtacgatgtcatgctggggtgctggcagagggaaccacagcagcggttgaacatcaaggagatctacaaaatcctccatgctttggggaaggccaccccaatctacctggacattcttggctag

SEQ ID NO: 375 - DNA, 2234 bp, Artificial sequence
  A novel predicted alternative spliced variant
atggatgtctctctttgcccagccaagtgtagtttctggcggattttcttgctgggaagcgtctggctggactatgtgggctccgtgctggcttgccctgcaaattgtgtctgcagcaagactgagatcaattgccggcggccggacgatgggaacctcttccccctcctggaagggcaggattcagggaacagcaatgggaacgccagtatcaacatcacggacatctcaaggaatatcacttccatacacatagagaactggcgcagtcttcacacgctcaacgccgtggacatggagctctacaccggacttcaaaagctgaccatcaagaactcaggacttcggagcattcagcccagagcctttgccaagaacccccatttgcgttatataaacctgtcaagtaaccggctcaccacactctcgtggcagctcttccagacgctgagtcttcgggaattgcagttggagcagaactttttcaactgcagctgtgacatccgctggatgcagctctggcaggagcagggggaggccaagctcaacagccagaacctctactgcatcaacgctgatggctcccagcttcctctcttccgcatgaacatcagtcagtgtgaccttcctgagatcagcgtgagccacgtcaacctgaccgtacgagagggtgacaatgctgttatcacttgcaatggctctggatcaccccttcctgatgtggactggatagtcactgggctgcagtccatcaacactcaccagaccaatctgaactggaccaatgttcatgccatcaacttgacgctggtgaatgtgacgagtgaggacaatggcttcaccctgacgtgcattgcagagaacgtggtgggcatgagcaatgccagtgttgccctcactgtctactatcccccacgtgtggtgagcctggaggagcctgagctgcgcctggagcactgcatcgagtttgtggtgcgtggcaaccccccaccaacgctgcactggctgcacaatgggcagcctctgcgggagtccaagatcatccatgtggaatactaccaagagggagagatttccgagggctgcctgctcttcaacaagcccacccactacaacaatggcaactataccctcattgccaaaaacccactgggcacagccaaccagaccatcaatggccacttcctcaaggagccctttccagagagcacggataactttatcttgtttgacgaagtgagtcccacacctcctatcactgtgacccacaaaccagaagaagacacttttggggtatccatagcagttggacttgctgcttttgcctgtgtcctgttggtggttctcttcgtcatgatcaacaaatatggtcgacggtccaaatttggaatgaagggtcccgtggctgtcatcagtggtgaggaggactcagccagcccactgcaccacatcaaccacggcatcaccacgccctcgtcactggatgcggggcccgacactgtggtcattggcatgactcgcatccctgtcattgagaacccccagtacttccgtcagggacacaactgccacaagccggacacgtatgtgcagcacattaagaggagagacatcgtgctgaagcgagaactgggtgagggagcctttggaaaggtcttcctggccgagtgctacaacctcagcccgaccaaggacaagatgcttgtggctgtgaaggccctgaaggatcccaccctggctgcccggaaggatttccagagggaggccgagctgctcaccaacctgcagcatgagcacattgtcaagttctatggagtgtgcggcgatggggaccccctcatcatggtctttgaatacatgaagcatggagacctgaataagttcctcaggtgggaggacacaccatgctccccattcgctggatgcctcctgaaagcatcatgtaccggaagttcactacagagagtgatgtatggagcttcggggtgatcctctgggagatcttcacctatggaaagcagccatggttccaactctcaaacacggaggtcattgagtgcattacccaaggtcgtgttttggagcggccccgagtctgccccaaagaggtgtacgatgtcatgctggggtgctggcagagggaaccacagcagcggttgaacatcaaggagatctacaaaatcctccatgctttggggaaggccaccccaatctacctggacattcttggctag

SEQ ID NO: 376 - DNA, 1314 bp, Artificial sequence
  A novel predicted alternative spliced variant
atgttcctggcgaccctgtacttcgcgctgccgctcttggacttgctcctgtcggccgaagtgagcggcggagaccgcctggattgcgtgaaagccagtgatcagtgcctgaaggagcagagctgcagcaccaagtaccgcacgctaaggcagtgcgtggcgggcaaggagaccaacttcagcctggcatccggcctggaggccaaggatgagtgccgcagcgccatggaggccctgaagcagaagtcgctctacaactgccgctgcaagcggggtatgaagaaggagaagaactgcctgcgcatttactggagcatgtaccagagcctgcaggatgtttttcagcaagtggagcacattcccaaagggaacaactgcctggatgcagcgaaggcctgcaacctcgacgacatttgcaagaagtacaggtcggcgtacatcaccccgtgcaccaccagcgtgtccaatgatgtctgcaaccgccgcaagtgccacaaggccctccggcagttctttgacaaggtcccggccaagcacagctacggaatgctcttctgctcctgccgggacatcgcctgcacagagcggaggcgacagaccatcgtgcctgtgtgctcctatgaagagagggagaagcccaactgtttgaatttgcaggactcctgcaagacgaattacatctgcagatctcgccttgcggatttttttaccaactgccagccagagtcaaggtctgtcagcagctgtctaaaggaaaactacgctgactgcctcctcgcctactcggggcttattggcacagtcatgacccccaactacatagactccagtagcctcagtgtggccccatggtgtgactgcagcaacagtgggaacgacctagaagagtgcttgaaatttttgaatttcttcaaggacaatacatgtcttaaaaatgcaattcaagcctttggcaatggctccgatgtgaccgtgtggcagccagccttcccagtacagaccaccactgccactaccaccactgccctccgggttaagaacaagcccctggggccagcagggtctgagaatgaaattcccactcatgttttgccaccgtgtgcaaatttacaggcacagaagctgaaatccaatgtgtcgggcaatacacacctctgtatttccaatggtaattatgaaaaagaaggtctcggtgcttccagccacataaccacaaaatcaatggctgctcctccaagctgtggtctgagcccactgctggtcctggtggtaaccgctctgtccaccctattatctttaacagaaacatcatag

SEQ ID NO: 377 - DNA, 1311 bp, Artificial sequence
  A novel predicted alternative spliced variant
atgatcttggcaaacgtcttctgcctcttcttctttctagacgagaccctccgctctttggccagcccttcctccctgcagggccccgagctccacggctggcgccccccagtggactgtgtccgggccaatgagctgtgtgccgccgaatccaactgcagctctcgctaccgcactctgcggcagtgcctggcaggccgcgaccgcaacaccatgctggccaacaaggagtgccaggcggccttggaggtcttgcaggagagcccgctgtacgactgccgctgcaagcggggcatgaagaaggagctgcagtgtctgcagatctactggagcatccacctggggctgaccgaggggacaggggcagacccggtggtcagcgccaagagcaaccattgcctggatgctgccaaggcctgcaacctgaatgacaactgcaagaagctgcgctcctcctacatctccatctgcaaccgcgagatctcgcccaccgagcgctgcaaccgccgcaagtgccacaaggccctgcgccagttcttcgaccgggtgcccagcgagtacacctaccgcatgctcttctgctcctgccaagaccaggcgtgcgctgagcgccgccggcaaaccatcctgcccagctgctcctatgaggacaaggagaagcccaactgcctggacctgcgtggcgtgtgccggactgaccacctgtgtcggtcccggctggccgacttccatgccaattgtcgagcctcctaccagacggtcaccagctgccctgcggacaattaccaggcgtgtctgggctcttatgctggcatgattgggtttgacatgacacctaactatgtggactccagccccactggcatcgtggtgtccccctggtgcagctgtcgtggcagcgggaacatggaggaggagtgtgagaagttcctcagggacttcaccgagaacccatgcctccggaacgccatccaggcctttggcaacggcacggacgtgaacgtgtccccaaaaggcccctcgttccaggccacccaggcccctcgggtggagaagacgccttctttgccagatgacctcagtgacagtaccagcttggggaccagtgtcatcaccacctgcacgtctgtccaggagcaggggctgaaggccaacaactccaaagagttaagcatgtgcttcacagagctcacgacaaatatcatcccagggagtaacaaggtgatcaaacctaactcaggccccagcagagccagaccgtcggctgccttgaccgtgctgtctgtcctgatgctgaaacaggccttgtag

SEQ ID NO: 378 - DNA, 3626 bp, Artificial sequence
  A novel predicted alternative spliced variant
atggagtcgcacagccgcgctggaaagagcagaaaatctgcaaaatttcggtccatctccaggtccctgatgctctgtaatgctaagaccagtgatgatggctctagccctgatgagaaatatcctgatccctttgagatttccttggcccagggcaaggagggaattttccactcatctgtgcagctggcagacacatcggaggctgggcccagcagtgttcctgatctagcactggcctcggaggctgctcaactccaagcagctgggaatgatcgaggcaagacctgtaggaggatattcttcatgaaggtgttaatccctattgcacaagagaaattgattttccaatgaccaagaaatctgcagcgcccacggacaggcagccttactctctctgcagtaacaggaagtccctctctcaacaattggactgtccagcaggaaaggctgcgggaacttcgagaccaacacggtccctgagcacagctcagctcgtgcagccatctgggggcctccaggcttcagtcatctccaacatcgtgctgatgaagggccaggctaagggtctgggcttcagcatcgttgggggaaaagacagcatttatggccccattgggatttacgtcaaaaccatttttgcagggggagcagcagcagccgatggaaggctacaggaaggtgatgaaattctggagctcaatggtgaatcaatggctggactaacacatcaggatgctttgcagaagttcaagcaagccaaaaaggggctcctcaccctcaccgtgagaacccgcctgacggcgcctccttccctgtgcagccacctgtctcccccactgtgccgctccctgagctccagcacttgtatcaccaaggacagcagctccttcgccttggaaagcccctcggctcccatcagcaccgccaagcccaattacagaatcatggtggaggtttctctgcagaaagaggccggcgtgggcctgggcatcggcctgtgcagcgttccctacttccaatgcatctctggcattttcgtccacacgctgtcaccaggatccgtggcgcacctggacggacgtctccggtgtggggacgagattgtggaaatcagtgattcccctgtgcactgcctgacgctcaatgaagtctacacgatcctgagtcactgtgatcccggtccagtccccatcattgttagccgacatccagacccacaggtctctgaacagcaactcaaagaagctgtggcccaggctgtggaaaacaccaagtttggaaaggagaggcatcagtggagtctggaaggtgtcaaaaggctggaaagcagttggcacgggcggcccaccttggagaaggaacgagagaagaactcagcacccccgcatcgcagggctcagaaggtcatgatccgctccagcagtgacagcagctacatgtctgggtccccagggggaagtcctgggagtggcagtgctgagaagccgtcctctgacgtggacatcagcacacacagccccagcttgcctctggcacgggagccagtggtgctttctatagcatcctccaggctgccccaggagagcccacccctcccagagagccgggacagccacccgccgctgagactgaagaaatcctttgagattttggaagcgagagagctgctgccactgctgctaccacaggaagacacagcagggagaagccctagtgcctctgccggctgcccaggacctggtatcggcccacagaccaagtcctccacagagggcgagccagggtggagaagagccagcccagtgacccaaacatccccgataaaacacccactgcttaagaggcaggctcggatggactatagctttgataccacagccgaagacccttgggttaggatttctgactgcatcaaaaacttatttagccccatcatgagtgagaaccatggccacatgcctctacagcccaatgccagcctgaatgaagaagaagggacacagggccacccagatgggaccccaccaaagctggacaccgccaatggcactcccaaagtttacaagtcagcagacagcagcactgtgaagaaaggtcctcctgtggctcccaagccagcctggtttcgccaaagcttgaaaggtttgaggaatcgtgcttcagacccaagagggctccctgatcctgccttgtccacccagccagcacctgcttccagggagcacctaggatcacacatccgggcctcctcctcctcctcctccatcaggcagagaatcagctcctttgaaacctttggctcctctcaactgcctgacaaaggagcccagagactgagcctccagccctcctctggggaggcagcaaaacctcttgggaagcatgaggaaggacggttttctggactcttggggcgaggggctgcacccactcttgtgccccagcagcctgagcaagtactgtcctcggggtcccctgcagcctccgaggccagagacccaggtgtgtctgagtcccctcccccagggcggcagcccaatcagaaaactctcccccctggcccggacccgctcctaaggctgctgtcaacacaggctgaggaatctcaaggcccagtgctcaagatgcctagccagcgagcacggagcttccccctgaccaggtcccagtcctgtgagacgaagctacttgacgaaaagaccagcaaactctattctatcagcagccaagtgtcatcggctgtcatgaaatccttgctgtgccttccatcttctatctcctgtgcccagactccctgcatccccaaggaaggggcatctccaacatcatcatccaacgaagactcagctgcaaatggttctgctgaaacatctgccttggacacggggttctcgctcaacctttcagagctgagagaatatacagagggtctcacggaagccaaggaagacgatgatggggaccacagttcccttcagtctggtcagtccgttatctccctgctgagctcagaagaattaaaaaaactcatcgaggaggtgaaggttctggatgaagcaacattaaagcaattagacggcatccatgtcaccatcttacacaaggaggaaggtgctggtcttgggttcagcttggcaggaggagcagatctagaaaacaaggtgattacggttcacagagtgtttccaaatgggctggcctcccaggaagggactattcagaagggcaatgaggttctttccatcaacggcaagtctctcaaggggaccacgcaccatgatgccttggccatcctccgccaagctcgagagcccaggcaagctgtgattgtcacaaggaagctgactccagaggccatgcccgacctcaactcctccactgactctgcagcctcagcctctgcagccagtgatgtttctgtagaatctacagcagaggccacagtctgcacggtgacactggagaagatgtcggcagggctgggcttcagcctggaaggagggaagggctccctacacggagacaagcctctcaccattaacaggattttcaaaggtggacacagaggacttcgtgccagaggcaagatccctgtaaatattgttgcacaaaaatctcactag

SEQ ID NO: 379 - DNA, 3633 bp, Artificial sequence
  A novel predicted alternative spliced variant
atggagtcgcacagccgcgctggaaagagcagaaaatctgcaaaatttcggtccatctccaggtccctgatgctctgtaatgctaagaccagtgatgatggctctagccctgatgagaaatatcctgatccctttgagatttccttggcccagggcaaggagggaattttccactcatctgtgcagctggcagacacatcggaggctgggcccagcagtgttcctgatctagcactggcctcggaggctgctcaactccaagcagctgggaatgatcgaggcaagacctgtaggaggatattcttcatgaaggaatcttccacagcttcctctcgagaaaagcctggaaaactagaagcacaaagtagtaacttcctgtttcctaaagcctgccaccaaagggcacgcagcaactcaaccagtgttaatccctattgcacaagagaaattgattttccaatgaccaagaaatctgcagcgcccacggacaggcagccttactctctctgcagtaacaggaagtccctctctcaacaattggactgtccagcaggaaaggctgcgggaacttcgagaccaacacggtccctgagcacagctcagctcgtgcagccatctgggggcctccaggcttcagtcatctccaacatcgtgctgatgaagggccaggctaagggtctgggcttcagcatcgttgggggaaaagacagcatttatggccccattgggatttacgtcaaaaccatttttgcagggggagcagcagcagccgatggaaggctacaggaaggtgatgaaattctggagctcaatggtgaatcaatggctggactaacacatcaggatgctttgcagaagttcaagcaagccaaaaaggggctcctcaccctcaccgtgagaacccgcctgacggcgcctccttccctgtgcagccacctgtctcccccactgtgccgctccctgagctccagcacttgtatcaccaaggacagcagctccttcgccttggaaagcccctcggctcccatcagcaccgccaagcccaattacagaatcatggtggaggtttctctgcagaaagaggccggcgtgggcctgggcatcggcctgtgcagcgttccctacttccaatgcatctctggcattttcgtccacacgctgtcaccaggatccgtggcgcacctggacggacgtctccggtgtggggacgagattgtggaaatcagtgattcccctgtgcactgcctgacgctcaatgaagtctacacgatcctgagtcactgtgatcccggtccagtccccatcattgttagccgacatccagacccacaggtctctgaacagcaactcaaagaagctgtggcccaggctgtggaaaacaccaagtttggaaaggagaggcatcagtggagtctggaaggtgtcaaaaggctggaaagcagttggcacgggcggcccaccttggagaaggaacgagagaagaactcagcacccccgcatcgcagggctcagaaggtcatgatccgctccagcagtgacagcagctacatgtctgggtccccagggggaagtcctgggagtggcagtgctgagaagccgtcctctgacgtggacatcagcacacacagccccagcttgcctctggcacgggagccagtggtgctttctatagcatcctccaggctgccccaggagagcccacccctcccagagagccgggacagccacccgccgctgagactgaagaaatcctttgagattttggaagcgagagagctgctgccactgctgctaccacaggaagacacagcagggagaagccctagtgcctctgccggctgcccaggacctggtatcggcccacagaccaagtcctccacagagggcgagccagggtggagaagagccagcccagtgacccaaacatccccgataaaacacccactgcttaagaggcaggctcggatggactatagctttgataccacagccgaagacccttgggttaggatttctgactgcatcaaaaacttatttagccccatcatgagtgagaaccatggccacatgcctctacagcccaatgccagcctgaatgaagaagaagggacacagggccacccagatgggaccccaccaaagctggacaccgccaatggcactcccaaagtttacaagtcagcagacagcagcactgtgaagaaaggtcctcctgtggctcccaagccagcctggtttcgccaaagcttgaaaggtttgaggaatcgtgcttcagacccaagagggctccctgatcctgccttgtccacccagccagcacctgcttccagggagcacctaggatcacacatccgggcctcctcctcctcctcctccatcaggcagagaatcagctcctttgaaacctttggctcctctcaactgcctgacaaaggagcccagagactgagcctccagccctcctctggggaggcagcaaaacctcttgggaagcatgaggaaggacggttttctggactcttggggcgaggggctgcacccactcttgtgccccagcagcctgagcaagtactgtcctcggggtcccctgcagcctccgaggccagagacccaggtgtgtctgagtcccctcccccagggcggcagcccaatcagaaaactctcccccctggcccggacccgctcctaaggctgctgtcaacacaggctgaggaatctcaaggcccagtgctcaagatgcctagccagcgagcacggagcttccccctgaccaggtcccagtcctgtgagacgaagctacttgacgaaaagaccagcaaactctattctatcagcagccaagtgtcatcggctgtcatgaaatccttgctgtgccttccatcttctatctcctgtgcccagactccctgcatccccaaggaaggggcatctccaacatcatcatccaacgaagactcagctgcaaatggttctgctgaaacatctgccttggacacggggttctcgctcaacctttcagagctgagagaatatacagagggtctcacggaagccaaggaagacgatgatggggaccacagttcccttcagtctggtcagtccgttatctccctgctgagctcagaagaattaaaaaaactcatcgaggaggtgaaggttctggatgaagcaacattaaaggttcacagagtgtttccaaatgggctggcctcccaggaagggactattcagaagggcaatgaggttctttccatcaacggcaagtctctcaaggggaccacgcaccatgatgccttggccatcctccgccaagctcgagagcccaggcaagctgtgattgtcacaaggaagctgactccagaggccatgcccgacctcaactcctccactgactctgcagcctcagcctctgcagccagtgatgtttctgtagaatctacagcagaggccacagtctgcacggtgacactggagaagatgtcggcagggctgggcttcagcctggaaggagggaagggctccctacacggagacaagcctctcaccattaacaggattttcaaaggtggacacagaggacttcgtgccagaggcaagatccctgtaaatattgttgcacaaaaatctcactag

SEQ ID NO: 380 - DNA, 643 bp, Artificial sequence
  A novel predicted alternative spliced variant
catgctgcccctctgcctcgtggccgccctgctgctggccgccgggcccgggccgagcctgggcgacgaagccatccactgcccgccctgctccgaggagaagctggcgcgctgccgcccccccgtgggctgcgaggagctggtgcgagaggcgggctgcggctgttgcgccacttgcgccctgggcttggggatgccctgcggggtgtacaccccccgttgcggctcgggcctgcgctgctacccgccccgaggggtggagaagcccctgcacacactgatgcacgggcaaggcgtgtgcatggagctggcggagatcgaggccatccaggaaagcctgcagccctctgacaaggacgagggtgaccaccccaacaacagcttcagcccctgtagcgcccatgaccgcaggtgcctgcagaagcacttcgccaaaattcgagaccggagcaccagtgggggcaagatgaaggtcaatggggcgccccgggaggatgcccggcctgtgtgtcacccagctctggatgggcagcgtggcaagtgctggtgtgtggaccggaagacgggggtgaagcttccggggggcctggagccaaagggggagctggactgccaccagctggctgacagctttcgagagtga

SEQ ID NO: 381 - DNA, 2616 bp, Artificial sequence
  A novel predicted alternative spliced variant
atggagagggggctgccgctcctctgcgccgtgctcgccctcgtcctcgccccggccggcgcttttcgcaacgatgaatgtggcgatactataaaaattgaaagccccgggtaccttacatctcctggttatcctcattcttatcacccaagtgaaaaatgcgaatggctgattcaggctccggacccataccagagaattatgatcaacttcaaccctcacttcgatttggaggacagagactgcaagtatgactacgtggaagtcttcgatggagaaaatgaaaatggacattttaggggaaagttctgtggaaagatagcccctcctcctgttgtgtcttcagggccatttctttttatcaaatttgtctctgactacgaaacacatggtgcaggattttccatacgttatgaaattttcaagagaggtcctgaatgttcccagaactacacaacacctagtggagtgataaagtcccccggattccctgaaaaatatcccaacagccttgaatgcacttatattgtctttgcgccaaagatgtcagagattatcctggaatttgaaagctttgacctggagcctgactcaaatcctccaggggggatgttctgtcgctacgaccggctagaaatctgggatggattccctgatgatttcaaatgtatggaagctctgggcatggaatcaggagaaattcattctgaccagatcacagcttcttcccagtatagcaccaactggtctgcagagcgctcccgcctgaactaccctgagaatgggtggactcccggagaggattcctaccgagagtggatacaggtagacttgggccttctgcgctttgtcacggctgtcgggacacagggcgccatttcaaaagaaaccaagaagaaatattatgtcaagacttacaagatcgacgttagctccaacggggaagactggatcaccataaaagaaggaaacaaacctgttctctttcagggaaacaccaaccccacagatgttgtggttgcagtattccccaaaccactgataactcgatttgtccgaatcaagcctgcaacttgggaaactggcatatctatgagatttgaagtatacggttgcaagataacagattatccttgctctggaatgttgggtatggtgtctggacttatttctgactcccagatcacatcatccaaccaaggagacagaaactggatgcctgaaaacatccgcctggtaaccagtcgctctggctgggcacttccacccgcacctcattcctacatcaatgagtggctccaaatagacctgggggaggagaagatcgtgaggggcatcatcattcagggtgggaagcaccgagagaacaaggtgttcatgaggaagttcaagatcgggtacagcaacaacggctcggactggaagatgatcatggatgacagcaaacgcaaggcgaagtcttttgagggcaacaacaactatgatacacctgagctgcggacttttccagctctctccacgcgattcatcaggatctaccccgagagagccactcatggcggactggggctcagaatggagctgctgggctgtgaagtggaagcccctacagctggaccgaccactcccaacgggaacttggtggatgaatgtgatgacgaccaggccaactgccacagtggaacaggtgatgacttccagctcacaggtggcaccactgtgctggccacagaaaagcccacggtcatagacagcaccatacaatcagagtttccaacatatggttttaactgtgaatttggctggggctctcacaagaccttctgccactgggaacatgacaatcacgtgcagctcaagtggagtgtgttgaccagcaagacgggacccattcaggatcacacaggagatggcaacttcatctattcccaagctgacgaaaatcagaagggcaaagtggctcgcctggtgagccctgtggtttattcccagaactctgcccactgcatgaccttctggtatcacatgtctgggtcccacgtcggcacactcagggtcaaactgcgctaccagaagccagaggagtacgatcagctggtctggatggccattggacaccaaggtgaccactggaaggaagggcgtgtcttgctccacaagtctctgaaactttatcaggtgattttcgagggcgaaatcggaaaaggaaaccttggtgggattgctgtggatgacattagtattaataaccacatttcacaagaagattgtgcaaaaccagcagacctggataaaaagaacccagaaattaaaattgatgaaacagggagcacgccaggatacgaaggtgaaggagaaggtgacaagaacatctccaggaagccaggcaatgtgttgaagaccttagaacccatcctcatcaccatcatagccatgagcgccctgggggtcctcctgggggctgtctgtggggtcgtgctgtactgtgcctgttggcataatgggatgtcagaaagaaacttgtctgccctggagaactataactttgaacttgtggatggtgtgaagttgaaaaaagacaaactgaatacacagagtacttattcggaggcatga

SEQ ID NO: 382 - DNA, 523 bp, Artificial sequence
  A novel predicted alternative spliced variant
atggctcccttaggtgaagttgggaactatttcggtgtgcaggatgcggtaccgtttgggaatgtgcccgtgttgccggtggacagcccggttttgttaagtgaccacctgggtcagtccgaagcaggggggctccccaggggacccgcagtcacggacttggatcatttaaaggggattctcaggcggaggcagctatactgcaggactggatttcacttagaaatcttccccaatggtactatccagggaaccaggaaagaccacagccgatttggaaaaactaacccaagagtgtgtattcagagaacagttcgaagaaaactggtataatacgtactcgtcaaacctatataagcacgtggacactggaaggcgatactatgttgcattaaataaagatgggaccccgagagaagggactaggactaaacggcaccagaaattcacacattttttacctagaccagtggaccccgacaaagtacctgaactgtataaggatattctaagccaaagttga

SEQ ID NO: 383 - DNA, 523 bp, Artificial sequence
  A novel predicted alternative spliced variant
atgtggaaatggatactgacacattgtgcctcagcctttccccacctgcccggctgctgctgctgctgctttttgttgctgttcttggtgtcttccgtccctgtcacctgccaagcccttggtcaggacatggtgtcaccagaggccaccaactcttcttcctcctccttctcctctccttccagcgcgggaaggcatgtgcggagctacaatcaccttcaaggagatgtccgctggagaaagctattctctttcaccaagtactttctcaagattgagaagaacgggaaggtcagcgggaccaagaaggagaactgcccgtacaaaagaatttaacaatgactgtaagctgaaggagaggatagaggaaaatggatacaatacctatgcatcatttaactggcagcataatgggaggcaaatgtatgtggcattgaatggaaaaggagctccaaggagaggacagaaaacacgaaggaaaaacacctctgctcactttcttccaatggtggtacactcatag

SEQ ID NO: 384 - DNA, 587 bp, Artificial sequence
  A novel predicted alternative spliced variant
atgtattcagcgccctccgcctgcacttgcctgtgctggttgccgaggagaacgtggacttccgcatccacgtggagaaccagacgcgggctcgggacgatgtgagccgtaagcagctgcggctgtaccagctctacagccggaccagtgggaaacacatccaggtcctgggccgcaggatcagtgcccgcggcgaggatggggacaagtatgcccagctcctagtggagacagacaccttcggtagtcaagtccggatcaagggcaaggagacggaattctacctgtgcatgaaccgcaaaggcaagctcgtggggaagcccgatggcaccagcaaggagtgtgtgttcatcgagaaggttctggagaacaactacacggccctgatgtcggctaagtactccggctggtacgtgggcttcaccaagaaggggcggccgcggaagggccccaagacccgggagaaccagcaggacgtgcatttcatgaagcgctaccccaaggggcagccggagcttcagaagcccttcaagtacacgacggtgaccaagaggtcccgtcggatccggcccacacaccctgcctag

SEQ ID NO: 385 - DNA, 517 bp, Artificial sequence
  A novel predicted alternative spliced variant
atgtattcagcgccctccgcctgcacttgcctgtgtttacacttcctgctgctgtgcttccaggtacaggtgctggttgccgaggagaacgtggacttccgcatccacgtggagaaccagacgcgggctcgggacgatgtgagccgtaagcagctgcggctgtaccagctctacagccggaccagtgggaaacacatccaggtcctgggccgcaggatcagtgcccgcggcgaggatggggacaagtatgcccgatggcaccagcaaggagtgtgtgttcatcgagaaggttctggagaacaactacacggccctgatgtcggctaagtactccggctggtacgtgggcttcaccaagaaggggcggccgcggaagggccccaagacccgggagaaccagcaggacgtgcatttcatgaagcgctaccccaaggggcagccggagcttcagaagcccttcaagtacacgacggtgaccaagaggtcccgtcggatccggcccacacaccctgcctag

SEQ ID NO: 386 - DNA, 1369 bp, Artificial sequence
  A novel predicted alternative spliced variant
atgacagttttcctttcctttgctttcctcgctgccattctgactcacatagggtgcagcaatcagcgccgaagtccagaaaacagtgggagaagatataaccggattcaacatgggcaatgtgcctacactttcattcttccagaacacgatggcaactgtcgtgagagtacgacagaccagtacaacacaaacgctctgcagagagatgctccacacgtggaaccggatttctcttcccagaaacttcaacatctggaacatgtgatggaaaattatactcagtggctgcaaaaacttgagaattacattgtggaaaacatgaagtcggagatggcccagatacagcagaatgcagttcagaaccacacggctaccatgctggagataggaaccagcctcctctctcagactgcagagcagaccagaaagctgacagatgttgagacccaggtactaaatcaaacttctcgacttgagatacagctgctggagaattcattatccacctacaagctagagaagcaacttcttcaacagacaaatgaaatcttgaagatccatgaaaaaaacagtttattagaacataaaatcttagaaatggaaggaaaacacaaggaagagttggacaccttaaaggaagagaaagagaaccttcaaggcttggttactcgtcaaacatatataatccaggagctggaaaagcaattaaacagagctaccaccaacaacagtgtccttcagaagcagcaactggagctgatggacacagtccacaaccttgtcaatctttgcactaaagaaggtggtgttttgcaatatggatgtcaatgggggaggttggactgtaatacaacatcgtgaagatggaagtctagatttccaaagaggctggaaggaatataaaatgggttttggaaatccctccggtgaatattggctggggaatgagtttatttttgccattaccagtcagaggcagtacatgctaagaattgagttaatggactgggaagggaaccgagcctattcacagtatgacagattccacataggaaatgaaaagcaaaactataggttgtatttaaaaggtcacactgggacagcaggaaaacagagcagcctgatcttacacggtgctgatttcagcactaaagatgctgataatgacaactgtatgtgcaaatgtgccctcatgttaacaggaggatggtggtttgatgcttgtggcccctccaatctaaatggaatgttctatactgcgggacaaaaccatggaaaactgaatgggataaagtggcactacttcaaagggcccagttactccttacgttccacaactatgatgattcgacctttagatttttga

SEQ ID NO: 387 - DNA, 1395 bp, Artificial sequence
  A novel predicted alternative spliced variant
atgacagttttcctttcctttgctttcctcgctgccattctgactcacatagggtgcagcaatcagcgccgaagtccagaaaacagtgggagaagatataaccggattcaacatgggcaatgtgcctacactttcattcttccagaacacgatggcaactgtcgtgagagtacgacagaccagtacaacacaaacgctctgcagagagatgctccacacgtggaaccggatttctcttcccagaaacttcaacatctggaacatgtgatggaaaattatactcagtggctgcaaaaacttgagaattacattgtggaaaacatgaagtcggagatggcccagatacagcagaatgcagttcagaaccacacggctaccatgctggagataggaaccagcctcctctctcagactgcagagcagaccagaaagctgacagatgttgagacccaggtactaaatcaaacttctcgacttgagatacagctgctggagaattcattatccacctacaagctagagaagcaacttcttcaacagacaaatgaaatcttgaagatccatgaaaaaaacagtttattagaacataaaatcttagaaatggaaggaaaacacaaggaagagttggacaccttaaaggaagagaaagagaaccttcaaggcttggttactcgtcaaacatatataatccaggagctggaaaagcaattaaacagagctaccaccaacaacagtgtccttcagaagcagcaactggagctgatggacacagtccacaaccttgtcaatctttgcactaaagaaggtgttttactaaagggaggaaaaagagaggaagagaaaccatttagagactgtgcagatgtatatcaagctggttttaataaaagtggaatctacactatttatattaataatatgccagaacccaaaaagggttttggaaatccctccggtgaatattggctggggaatgagtttatttttgccattaccagtcagaggcagtacatgctaagaattgagttaatggactgggaagggaaccgagcctattcacagtatgacagattccacataggaaatgaaaagcaaaactataggttgtatttaaaaggtcacactgggacagcaggaaaacagagcagcctgatcttacacggtgctgatttcagcactaaagatgctgataatgacaactgtatgtgcaaatgtgccctcatgttaacaggaggatggtggtttgatgcttgtggcccctccaatctaaatggaatgttctatactgcgggacaaaaccatggaaaactgaatgggataaagtggcactacttcaaagggcccagttactccttacgttccacaactatgatgattcgacctttagatttttga

SEQ ID NO: 388 - DNA, 1366 bp, Artificial sequence
  A novel predicted alternative spliced variant
atgacagttttcctttcctttgctttcctcgctgccattctgactcacatagggtgcagcaatcagcgccgaagtccagaaaacagtgggagaagatataaccggattcaacatgggcaatgtgcctacactttcattcttccagaacacgatggcaactgtcgtgagagtacgacagaccagtacaacacaaacgctctgcagagagatgctccacacgtggaaccggatttctcttcccagaaacttcaacatctggaacatgtgatggaaaattatactcagtggctgcaaaaacttgagaattacattgtggaaaacatgaagtcggagatggcccagatacagcagaatgcagttcagaaccacacggctaccatgctggagataggaaccagcctcctctctcagactgcagagcagaccagaaagctgacagatgttgagacccaggtactaaatcaaacttctcgacttgagatacagctgctggagaattcattatccacctacaagctagagaagcaacttcttcaacagacaaatgaaatcttgaagatccatgaaaaaaacagtttattagaacataaaatcttagaaatggaaggaaaacacaaggaagagttggacaccttaaaggaagagaaagagaaccttcaaggcttggttactcgtcaaacatatataatccaggagctggaaaagcaattaaacagagctaccaccaacaacagtgtccttcagaagcagcaactggagctgatggacacagtccacaaccttgtcaatctttgcactaaagaaggtgttttactaaagggaggaaaaagagaggaagagaaaccatttagagactgtgcagatgtatatcaagctggttttaataaaagtggaatctacactatttatattaataatatgccagaacccaaaaaggtgttttgcaatatggatgtcaatgggggaggttggactgtaatacaacatcgtgaagatggaagtctagatttccaaagaggctggaaggaatataaaatgggttttggaaatccctccggtgaatattggctggggaatgagtttatttttgccattaccagtcagaggcagtacatgctaagaattgagttaatggactgggaagggaaccgagcctattcacagtatgacagattccacataggaaatgaaaagcaaaactataggatggtggtttgatgcttgtggcccctccaatctaaatggaatgttctatactgcgggacaaaaccatggaaaactgaatgggataaagtggcactacttcaaagggcccagttactccttacgttccacaactatgatgattcgacctttagatttttga

SEQ ID NO: 389 - DNA, 1124 bp, Artificial sequence
  A novel predicted alternative spliced variant
atgcagccgcctccaagtctgtgcggacgcgccctggttgcgctggttcttgcctgcggcctgtcgcggatctggggagaggagagaggcttcccgcctgacagggccactccgcttttgcaaaccgcagagataatgacgccacccactaagaccttatggcccaagggttccaacgccagtctggcgcggtcgttggcacctgcggaggtgcctaaaggagacaggacggcaggatctccgccacgcaccatctcccctcccccgtgccaaggacccatcgagatcaaggagactttcaaatacatcaacacggttgtgtcctgccttgtgttcgtgctggggatcatcgggaactccacacttctgagaattatctacaagaacaagtgcatgcgaaacggtcccaatatcttgatcgccagcttggctctgggagacctgctgcacatcgtcattgacatccctatcaatgtctacaagctgctggcagaggactggccatttggagctgagatgtgtaagctggtgcctttcatacagaaagcctccgtgggaatcactgtgctgagtctatgtgctctgagtattgacagttttacaagacagcaaaagattggtggctgttcagtttctatttctgcttgccattggccatcactgcatttttttatacactaatgacctgtgaaatgttgagaaagaaaagtggcatgcagattgctttaaatgatcacctaaagcagagacgggaagtggccaaaaccgtcttttgcctggtccttgtctttgccctctgctggcttccccttcacctcagcaggattctgaagctcactctttataatcagaatgatcccaatagatgtgaacttttgagctttctgttggtattggactatattggtatcaacatggcttcactgaattcctgcattaacccaattgctctgtatttggtgagcaaaagattcaaaaactgctttaagtcatgcttatgctgctggtgccagtcatttgaagaaaaacagtccttggaggaaaagcagtcgtgcttaaagttcaaagctaatgatcacggatatgacaacttccgttccagtaataaatacagctcatcttga

SEQ ID NO: 390 - DNA, 2226 bp, Artificial sequence
  A novel predicted alternative spliced variant
atgcggggcgtgtggccgcccccggtgtccgccctgctgtcggcgctgggggtgaacttccacagcccccggagtggccagaggtgctgggctgcacggacccaggtggagaagcggctggtggtgttggtggtacttctggcggcaggactggtggcctgcttggcagcactgggcatccagtaccagacaagatccccctctgtgtgcctgagcgaagcttgtgtctcagtgaccagctccatcttgagctccatggaccccacagtggacccctgccatgacttcttcagctacgcctgtgggggctggatcaaggccaacccagtccctgatggccactcacgctgggggaccttcagcaacctctgggaacacaaccaagcaatcatcaagcacctcctcgaaaactccacggccagcgtgagcgaggcagagagaaaggcgcaagtatactaccgtgcgtgcatgaacgagaccaggatcgaggagctcagggccaaacctctaatggagttgattgagaggctcgggggctggaacatcacaggtccctgggccaaggacaacttccaggacaccctgcaggtggtcaccgcccactaccgcacctcacccttcttctctgtctatgtcagtgccgattccaagaactccaacagcaacgtgatccaggtggaccagtctggcctgggcttgccctcgagagactattacctgaacaaaactgaaaacgagaaggtgctgaccggatatctgaactacatggtccagctggggaagctgctgggcggcggggacgaggaggccatccggccccagatgcagcagatcttggactttgagacggcactggccaacatcaccatcccacaggagaagcgccgtgatgaggagctcatctaccacaaagtgacggcagccgagctgcagaccttggcacccgccatcaactggttgccttttctcaacaccatcttctaccccgtggagatcaatgaatccgagcctattgtggtctatgacaaggaataccttgagcagatctccactctcatcaacaccaccgacagatgcctgctcaacaactacatgatctggaacctggtgcggaaaacaagctccttccttgaccagcgctttcaggacgccgatgagaagttcatggaagtcatgtacgggaccaagaagacctgtcttcctcgctggaagttttgcgtgagtgacacagaaaacaacctgggctttgcgttgggccccatgtttgtcaaagcaaccttcgccgaggacagcaagagcatagccaccgagatcatcctggagattaagaaggcatttgaggaaagcctgagcaccctgaagtggatggatgaggaaacccgaaaatcagccaaggaaaaggccgatgccatctacaacatgataggataccccaacttcatcatggatcccaaggagctggacaaagtgtttaatgactacactgcagttccagacctctactttgaaaatgccatgcggtttttcaacttctcatggagggtcactgccgatcagctcaggaaagcccccaacagagatcagtggagcatgaccccgcccatggtgaacgcctactactcgcccaccaagaatgagattgtgtttccggccgggatcctgcaggcaccattctacacacgctcctcacccaaggccttaaactttggtggcataggtgtcgtcgtgggccatgagctgactcatgcttttgatgatcaaggacgggagtatgacaaggacgggaacctccggccatggtggaagaactcatccgtggaggccttcaagcgtcagaccgagtgcatggtagagcagtacagcaactacagcgtgaacggggagccggtgaacgggcggcacaccctgggggagaacatcgccgacaacgggggtctcaaggcggcctatcgggcttaccagaactgggtgaagaagaacggggctgagcactcgctccccaccctgggcctcaccaataaccagctcttcttcctgggctttgcacaggtctggtgctccgtccgcacacctgagagctcccacgaaggcctcatcaccgatccccacagcccctctcgcttccgggtcatcggctccctctccaattccaaggagttctcagaacacttccgctgcccacctggctcacccatgaacccgcctcacaagtgcgaagtctggtaa

SEQ ID NO: 391 - DNA, 2211 bp, Artificial sequence
  A novel predicted alternative spliced variant
atgaacgtcgcgctgcaggagctgggagctggcagcaacgtgggattccagaaggggacaagacagctgttaggctcacgcacgcagctggagctggtcttagcaggtgcctctctactgctggctgcactgcttctgggctgccttgtggccctaggggtccagtaccacagagacccatcccacagcacctgccttacagaggcctgcattcgagtggctggaaaaatcctggagtccctggaccgaggggtgagcccctgtgaggacttttaccagttctcctgtgggggctggattcggaggaaccccctgcccgatgggcgttctcgctggaacaccttcaacagcctctgggaccaaaaccaggccatactgaagcacctgcttgaaaacaccaccttcaactccagcagtgaagctgagcagaagacacagcgcttctacctatcttgcctacaggtggagcgcattgaggagctgggagcccagccactgagagacctcattgagaagattggtggttggaacattacggggccctgggaccaggacaactttatggaggtgttgaaggcagtagcagggacctacagggccaccccattcttcaccgtctacatcagtgctgactctaagagttccaacagcaatgttatccaggtggaccagtctgggctctttctgccctctcgggattactacttaaacagaactgccaatgagaaagtgctcactgcctatctggattacatggaggaactggggatgctgctgggtgggcggcccacctccacgagggagcagatgcagcaggtgctggagttggagatacagctggccaacatcacagtgccccaggaccagcggcgcgacgaggagaagatctaccacaagatgagcatttcggagctgcaggctctggcgccctccatggactggcttgagttcctgtctttcttgctgtcaccattggagttgagtgactctgagcctgtggtggtgtatgggatggattatttgcagcaggtgtcagagctcatcaaccgcacggaaccaagcatcctgaacaattacctgatctggaacctggtgcaaaagacaacctcaagcctggaccgacgctttgagtctgcacaagagaagctgctggagaccctctatggcactaagaagtcctgtgtgccgaggtggcagacctgcatctccaacacggatgacgcccttggctttgctttggggtccctcttcgtgaaggccacgtttgaccggcaaagcaaagaaattgcagaggggatgatcagcgaaatccggaccgcatttgaggaggccctgggacagctggtttggatggatgagaagacccgccaggcagccaaggagaaagcagatgccatctatgatatgattggtttcccagactttatcctggagcccaaagagctggatgatgtttatgacgggtacgaaatttctgaagattctttcttccaaaacatgttgaatttgtacaacttctctgccaaggttatggctgaccagctccgcaagcctcccagccgagaccagtggagcatgaccccccagacagtgaatgcctactaccttccaactaagaatgagatcgtcttccccgctggcatcctgcaggcccccttctatgcccgcaaccaccccaaggccctgaacttcggtggcatcggtgtggtcatgggccatgagttgacgcatgcctttgatgaccaagggcgcgagtatgacaaagaagggaacctgcggccctggtggcagaatgagtccctggcagccttccggaaccacacggcctgcatggaggaacagtacaatcaataccaggtcaatggggagaggctcaacggccgccagacgctgggggagaacattgctgacaacggggggctgaaggctgcctacaatgcttacaaagcatggctgagaaagcatggggaggagcagcaactgccagccgtggggctcaccaaccaccagctcttcttcgtgggatttgcccaggtgtggtgctcggtccgcacaccagagagctctcacgaggggctggtgaccgacccccacagccctgcccgcttccgcgtgctgggcactctctccaactcccgtgacttcctgcggcacttcggctgccctgtcggctcccccatgaacccagggcagctgtgtgaggtgtggtag

SEQ ID NO: 392 - DNA, 2109 bp, Artificial sequence
  A novel predicted alternative spliced variant
atgaacgtcgcgctgcaggagctgggagctggcagcaacatggtggagtacaaacgggccacgcttcgggatgaagacgcacccgagacccccgtagagggcggggcctccccggacgccatggaggtgggattccagaaggggacaagacagctgttaggctcacgcacgcagctggagctggtcttagcaggtgcctctctactgctggctgcactgcttctgggctgccttgtggccctaggggtccagtaccacagagacccatcccacagcacctgccttacagaggcctgcattcgagtggctggaaaaatcctggagtccctggaccgaggggtgagcccctgtgaggacttttaccagttctcctgtgggggctggattcggaggaaccccctgcccgatgggcgttctcgctggaacaccttcaacagcctctgggaccaaaaccaggccatactgaagcacctgcttgaaaacaccaccttcaactccagcagtgaagctgagcagaagacacagcgcttctacctatcttgcctacaggtggagcgcattgaggagctgggagcccagccactgagagacctcattgagaagattggtggttggaacattacggggccctgggaccaggacaactttatggaggtgttgaaggcagtagcagggacctacagggccaccccattcttcaccgtctacatcagtgctgactctaagagttccaacagcaatgttatccaggtggaccagtctgggctctttctgccctctcgggattactacttaaacagaactgccaatgagaaagctctggcgccctccatggactggcttgagttcctgtctttcttgctgtcaccattggagttgagtgactctgagcctgtggtggtgtatgggatggattatttgcagcaggtgtcagagctcatcaaccgcacggaaccaagcatcctgaacaattacctgatctggaacctggtgcaaaagacaacctcaagcctggaccgacgctttgagtctgcacaagagaagctgctggagaccctctatggcactaagaagtcctgtgtgccgaggtggcagacctgcatctccaacacggatgacgcccttggctttgctttggggtccctcttcgtgaaggccacgtttgaccggcaaagcaaagaaattgcagaggggatgatcagcgaaatccggaccgcatttgaggaggccctgggacagctggtttggatggatgagaagacccgccaggcagccaaggagaaagcagatgccatctatgatatgattggtttcccagactttatcctggagcccaaagagctggatgatgtttatgacgggtacgaaatttctgaagattctttcttccaaaacatgttgaatttgtacaacttctctgccaaggttatggctgaccagctccgcaagcctcccagccgagaccagtggagcatgaccccccagacagtgaatgcctactaccttccaactaagaatgagatcgtcttccccgctggcatcctgcaggcccccttctatgcccgcaaccaccccaaggccctgaacttcggtggcatcggtgtggtcatgggccatgagttgacgcatgcctttgatgaccaagggcgcgagtatgacaaagaagggaacctgcggccctggtggcagaatgagtccctggcagccttccggaaccacacggcctgcatggaggaacagtacaatcaataccaggtcaatggggagaggctcaacggccgccagacgctgggggagaacattgctgacaacggggggctgaaggctgcctacaatgcttacaaagcatggctgagaaagcatggggaggagcagcaactgccagccgtggggctcaccaaccaccagctcttcttcgtgggatttgcccaggtgtggtgctcggtccgcacaccagagagctctcacgaggggctggtgaccgacccccacagccctgcccgcttccgcgtgctgggcactctctccaactcccgtgacttcctgcggcacttcggctgccctgtcggctcccccatgaacccagggcagctgtgtgaggtgtggtag

SEQ ID NO: 393 - DNA, 2199 bp, Artificial sequence
  A novel predicted alternative spliced variant
atgaacgtcgcgctgcaggagctgggagctggcagcaacatggtggagtacaaacgggccacgcttcgggatgaagacgcacccgagacccccgtagagggcggggcctccccggacgccatggaggtgggattccagaaggggacaagacagctgttaggctcacgcacgcagctggagctggtcttagcaggtgcctctctactgctggctgcactgcttctgggctgccttgtggccctaggggtccagtaccacagagacccatcccacagcacctgccttacagaggcctgcattcgagtggctggaaaaatcctggagtccctggaccgaggggtgagcccctgtgaggacttttaccagttctcctgtgggggctggattcggaggaaccccctgcccgatgggcgttctcgctggaacaccttcaacagcctctgggaccaaaaccaggccatactgaagcacctgcttgaaaacaccaccttcaactccagcagtgaagctgagcagaagacacagcgcttctacctatcttgcctacaggtggagcgcattgaggagctgggagcccagccactgagagacctcattgagaagattggtggttggaacattacggggccctgggaccaggacaactttatggaggtgttgaaggcagtagcagggacctacagggccaccccattcttcaccgtctacatcagtgctgactctaagagttccaacagcaatgttatccaggtggaccagtctgggctctttctgccctctcgggattactacttaaacagaactgccaatgagaaagtgctcactgcctatctggattacatggaggaactggggatgctgctgggtgggcggcccacctccacgagggagcagatgcagcaggtgctggagttggagatacagctggccaacatcacagtgccccaggaccagcggcgcgacgaggagaagatctaccacaagatgagcatttcggagctgcaggctctggcgccctccatggactggcttgagttcctgtctttcttgctgtcaccattggagttgagtgactctgagcctgtggtggtgtatgggatggattatttgcagcaggtgtcagagctcatcaaccgcacggaaccaagcatcctgaacaattacctgatctggaacctggtgcaaaagacaacctcaagcctggaccgacgctttgagtctgcacaagagaagctgctggagaccctctatggcactaagaagtcctgtgtgccgaggtggcagacctgcatctccaacacggatgacgcccttggctttgctttggggtccctcttcgtgaaggccacgtttgaccggcaaagcaaagaaattgcagatgccatctatgatatgattggtttcccagactttatcctggagcccaaagagctggatgatgtttatgacgggtacgaaatttctgaagattctttcttccaaaacatgttgaatttgtacaacttctctgccaaggttatggctgaccagctccgcaagcctcccagccgagaccagtggagcatgaccccccagacagtgaatgcctactaccttccaactaagaatgagatcgtcttccccgctggcatcctgcaggcccccttctatgcccgcaaccaccccaaggccctgaacttcggtggcatcggtgtggtcatgggccatgagttgacgcatgcctttgatgaccaagggcgcgagtatgacaaagaagggaacctgcggccctggtggcagaatgagtccctggcagccttccggaaccacacggcctgcatggaggaacagtacaatcaataccaggtcaatggggagaggctcaacggccgccagacgctgggggagaacattgctgacaacggggggctgaaggctgcctacaatgcttacaaagcatggctgagaaagcatggggaggagcagcaactgccagccgtggggctcaccaaccaccagctcttcttcgtgggatttgcccaggtgtggtgctcggtccgcacaccagagagctctcacgaggggctggtgaccgacccccacagccctgcccgcttccgcgtgctgggcactctctccaactcccgtgacttcctgcggcacttcggctgccctgtcggctcccccatgaacccagggcagctgtgtgaggtgtggtag

SEQ ID NO: 394 - DNA, 2220 bp, Artificial sequence
  A novel predicted alternative spliced variant
atgaacgtcgcgctgcaggagctgggagctggcagcaacatggtggagtacaaacgggccacgcttcgggatgaagacgcacccgagacccccgtagagggcggggcctccccggacgccatggaggtgggattccagaaggggacaagacagctgttaggctcacgcacgcagctggagctggtcttagcaggtgcctctctactgctggctgcactgcttctgggctgccttgtggccctaggggtccagtaccacagagacccatcccacagcacctgccttacagaggcctgcattcgagtggctggaaaaatcctggagtccctggaccgaggggtgagcccctgtgaggacttttaccagttctcctgtgggggctggattcggaggaaccccctgcccgatgggcgttctcgctggaacaccttcaacagcctctgggaccaaaaccaggccatactgaagcacctgcttgaaaacaccaccttcaactccagcagtgaagctgagcagaagacacagcgcttctacctatcttgcctacaggtggagcgcattgaggagctgggagcccagccactgagagacctcattgagaagattggtggttggaacattacggggccctgggaccaggacaactttatggaggtgttgaaggcagtagcagggacctacagggccaccccattcttcaccgtctacatcagtgctgactctaagagttccaacagcaatgttatccaggtggaccagtctgggctctttctgccctctcgggattactacttaaacagaactgccaatgagaaagtgctcactgcctatctggattacatggaggaactggggatgctgctgggtgggcggcccacctccacgagggagcagatgcagcaggtgctggagttggagatacagctggccaacatcacagtgccccaggaccagcggcgcgacgaggagaagatctaccacaagatgagcatttcggagctgcaggctctggcgccctccatggactggcttgagttcctgtctttcttgctgtcaccattggagttgagtgactctgagcctgtggtggtgtatgggatggattatttgcagcaggtgtcagagctcatcaaccgcacggaaccaagcatcctgaacaattacctgatctggaacctggtgcaaaagacaacctcaagcctggaccgacgctttgagtctgcacaagagaagctgctggagaccctctatggcactaagaagtcctgtgtgccgaggtggcagacctgcatctccaacacggatgacgcccttggctttgctttggggtccctcttcgtgaaggccacgtttgaccggcaaagcaaagaaattgcagaggggatgatcagcgaaatccggaccgcatttgaggaggccctgggacagctggtttggatggatgagaagacccgccaggcagccaaggagaaatacgaaatttctgaagattctttcttccaaaacatgttgaatttgtacaacttctctgccaaggttatggctgaccagctccgcaagcctcccagccgagaccagtggagcatgaccccccagacagtgaatgcctactaccttccaactaagaatgagatcgtcttccccgctggcatcctgcaggcccccttctatgcccgcaaccaccccaaggccctgaacttcggtggcatcggtgtggtcatgggccatgagttgacgcatgcctttgatgaccaagggcgcgagtatgacaaagaagggaacctgcggccctggtggcagaatgagtccctggcagccttccggaaccacacggcctgcatggaggaacagtacaatcaataccaggtcaatggggagaggctcaacggccgccagacgctgggggagaacattgctgacaacggggggctgaaggctgcctacaatgcttacaaagcatggctgagaaagcatggggaggagcagcaactgccagccgtggggctcaccaaccaccagctcttcttcgtgggatttgcccaggtgtggtgctcggtccgcacaccagagagctctcacgaggggctggtgaccgacccccacagccctgcccgcttccgcgtgctgggcactctctccaactcccgtgacttcctgcggcacttcggctgccctgtcggctcccccatgaacccagggcagctgtgtgaggtgtggtag

SEQ ID NO: 395 - DNA, 2187 bp, Artificial sequence
  A novel predicted alternative spliced variant
atgaacgtcgcgctgcaggagctgggagctggcagcaacatggtggagtacaaacgggccacgcttcgggatgaagacgcacccgagacccccgtagagggcggggcctccccggacgccatggaggtgggattccagaaggggacaagacagctgttaggctcacgcacgcagctggagctggtcttagcaggtgcctctctactgctggctgcactgcttctgggctgccttgtggccctaggggtccagtaccacagagacccatcccacagcacctgccttacagaggcctgcattcgagtggctggaaaaatcctggagtccctggaccgaggggtgagcccctgtgaggacttttaccagttctcctgtgggggctggattcggaggaaccccctgcccgatgggcgttctcgctggaacaccttcaacagcctctgggaccaaaaccaggccatactgaagcacctgcttgaaaacaccaccttcaactccagcagtgaagctgagcagaagacacagcgcttctacctatcttgcctacaggtggagcgcattgaggagctgggagcccagccactgagagacctcattgagaagattggtggttggaacattacggggccctgggaccaggacaactttatggaggtgttgaaggcagtagcagggacctacagggccaccccattcttcaccgtctacatcagtgctgactctaagagttccaacagcaatgttatccaggtggaccagtctgggctctttctgccctctcgggattactacttaaacagaactgccaatgagaaagtgctcactgcctatctggattacatggaggaactggggatgctgctgggtgggcggcccacctccacgagggagcagatgcagcaggtgctggagttggagatacagctggccaacatcacagtgccccaggaccagcggcgcgacgaggagaagatctaccacaagatgagcatttcggagctgcaggctctggcgccctccatggactggcttgagttcctgtctttcttgctgtcaccattggagttgagtgactctgagcctgtggtggtgtatgggatggattatttgcagcaggtgtcagagctcatcaaccgcacggaaccaagcatcctgaacaattacctgatctggaacctggtgcaaaagacaacctcaagcctggaccgacgctttgagtctgcacaagagaagctgctggagaccctctatggcactaagaagtcctgtgtgccgaggtggcagacctgcatctccaacacggatgacgcccttggctttgctttggggtccctcttcgtgaaggccacgtttgaccggcaaagcaaagaaattgcagaggggatgatcagcgaaatccggaccgcatttgaggaggccctgggacagctggtttggatggatgagaagacccgccaggcagccaaggagaaagcagatgccatctatgatatgattggtttcccagactttatcctggagcccaaagagctggatgatgtttatgacgggtacgaaatttctgaagattctttcttccaaaacatgttgaatttgtacaacttctctgccaaggttatggctgaccagctccgcaagcctcccagccgagaccaggccctgaacttcggtggcatcggtgtggtcatgggccatgagttgacgcatgcctttgatgaccaagggcgcgagtatgacaaagaagggaacctgcggccctggtggcagaatgagtccctggcagccttccggaaccacacggcctgcatggaggaacagtacaatcaataccaggtcaatggggagaggctcaacggccgccagacgctgggggagaacattgctgacaacggggggctgaaggctgcctacaatgcttacaaagcatggctgagaaagcatggggaggagcagcaactgccagccgtggggctcaccaaccaccagctcttcttcgtgggatttgcccaggtgtggtgctcggtccgcacaccagagagctctcacgaggggctggtgaccgacccccacagccctgcccgcttccgcgtgctgggcactctctccaactcccgtgacttcctgcggcacttcggctgccctgtcggctcccccatgaacccagggcagctgtgtgaggtgtggtag

SEQ ID NO: 396 - DNA, 3022 bp, Artificial sequence
  A novel predicted alternative spliced variant
atggccagagctttgtgtccactgcaagccctctggcttctggagtgggtgctgctgctcttgggaccttgtgctgcccctccagcctgggccttgaacctggacccagtgcagctcaccttctatgcaggccccaatggcagccagtttggattttcactggacttccacaaggacagccatgggagagtggccatcgtggtgggcgccccgcggaccctgggccccagccaggaggagacgggcggcgtgttcctgtgcccctggagggccgagggcggccagtgcccctcgctgctctttgacctccgcctgcgccccctggcagcactggaacgtcctagaaaagactgaggaggctgagaagacgcccgtaggtagctgctttttggctcagccagagagcggccgccgcgccgagtactccccctgtcgcgggaacaccctgagccgcatttacgtggaaaatgattttagctgggacaagcgttactgtgaagcgggcttcagctccgtggtcactcaggccggagagctggtgcttggggctcctggcggctattatttcttaggtctcctggcccaggctccagttgcggatattttctcgagttaccgcccaggcatccttttgtggcacgtgtcctcccagagcctctcctttgactccagcaacccagagtacttcgacggctactgggggtactcggtggccgtgggcgagttcgacggggatctcaacactacagaatatgtcgtcggtgcccccacttggagctggaccctgggagcggtggaaattttggattcctactaccagaggctgcatcggctgcgcgcagagcagatggcgtcgtattttgggcattcagtggctgtcactgacgtcaacggggatgggaggcatgatctgctggtgggcgctccactgtatatggagagccgggcagaccgaaaactggccgaagtggggcgtgtgtatttgttcctgcagccgcgaggcccccacgcgctgggtgcccccagcctcctgctgactggcacacagctctatgggcgattcggctctgccatcgcacccctgggcgacctcgaccgggatggctacaatgacattgcagtggctgccccctacgggggtcccagtggccggggccaagtgctggtgttcctgggtcagagtgaggggctgaggtcacgtccctcccaggtcctggacagccccttccccacaggctctgcctttggcttctcccttcgaggtgccgtagacatcgatgacaacggatacccagacctgatcgtgggagcttacggggccaaccaggtggctgtgtacagagctcagccagtggtgaaggcctctgtccagctactggtgcaagattcactgaatcctgctgtgaagagctgtgtcctacctcagaccaagacacccgtgagctgcttcaacatccagatgtgtgttggagccactgggcacaacattcctcagaagctatccctaaatgccgagctgcagctggaccggcagaagccccgccagggccggcgggtgctgctgctgggctctcaacaggcaggcaccaccctgaacctggatctgggcggaaagcacagccccatctgccacaccaccatggccttccttcgagatgaggcagacttccgggacaagctgagccccattgtgctcagcctcaatgtgtccctaccgcccacggaggctggaatggcccctgctgtcgtgctgcatggagacacccatgtgcaggagcagacacgaatcgtcctggactctggggaagatgacgtatgtgtgccccagcttcagctcactgccagcgtgacgggctccccgctcctagttggggcagataatgtcctggagctgcagatggacgcagccaacgagggcgagggggcctatgaagcagagctggccgtgcacctgccccagggcgcccactacatgcgggccctaagcaatgtcgagggctttgagagactcatctgtaatcagaagaaggagaatgagaccagggtggtgctgtgtgagctgggcaaccccatgaagaagaacgcccagataggaatcgcgatgttggtgagcgtggggaatctggaagaggctggggagtctgtgtccttccagctgcagatacggagcaagaacagccagaatccaaacagcaagattgtgctgctggacgtgccggtccgggcagaggcccaagtggagctgcgagggaactcctttccagcctccctggtggtggcagcagaagaaggtgagagggagcagaacagcttggacagctggggacccaaagtggagcacacctatgagctccacaacaatggccctgggactgtgaatggtcttcacctcagcatccaccttccgggacagtcccagccctccgacctgctctacatcctggatatacagccccaggggggccttcagtgcttcccacagcctcctgtcaaccctctcaaggtggactgggggctgcccatccccagcccctcccccattcacccggcccatcacaagcgggatcgcagacagatcttcctgccagagcccgagcagccctcgaggcttcaggatccagttctcgtaagctgcgactcggcgccctgtactgtggtgcagtgtgacctgcaggagatggcgcgcgggcagcgggccatggtcacggtgctggccttcctgtggctgcccagcctctaccagaggcctctggatcagtttgtgctgcagtcgcacgcatggttcaacgtgtcctccctcccctatgcggtgcccccgctcagcctgccccgaggggaagctcaggtgtggacacagctgctccgggccttggaggagagggccattccaatctggtgggtgctggtgggtgtgctgggtggcctgctgctgctcaccatcctggtcctggccatgtggaaggtcggcttcttcaagcggaaccggccacccctggaagaagatgatgaagagggggagtga

SEQ ID NO: 397 - DNA, 1775 bp, Artificial sequence
  A novel predicted alternative spliced variant
atgccctcctgggccctcttcatggtcacctcctgcctcctcctggcccctcaaaacctggcccaagtcagcagccaagggagaagccccgtgcttgccccctgagttcccagagcatgccccactttggaacccgatacgtgtgccagtttccagaccaggaggaagtgcgtctcttctttccgctgcacctctgggtgaagaatgtgttcctaaaccagactcggactcagcgagtcctctttgtggacagtgtaggcctgccggctccccccagtatcatcaaggccatgggtgggagccagccaggggaacttcagatcagctgggaggagccagctccagaaatcagtgatttcctgaggtacgaactccgctatggccccagagatcccaagaactccactggtcccacggtcatacagctgattgccacagaaacctgctgccctgctctgcagaggcctcactcagcctctgctctggaccagtctccatgtgctcagcccacaatgccctggcaagatggaccaaagcagacctccccaagtagagaagcttcagctctgacagcagagggtggaagctgcctcatctcaggactccagcctggcaactcctactggctgcagctgcgcagcgaacctgatgggatctccctcggtggctcctggggatcctggtccctccctgtgactgtggacctgcctggagatgcagtggcacttggactgcaatgctttaccttggacctgaagaatgttacctgtcaatggcagcaacaggaccatgctagctcccaaggcttcttctaccacagcagggcacggtgctgccccagagacaggtaccccatctgggagaactgcgaagaggaagagaaaacaaatccaggactacagaccccacagttctctcgctgccacttcaagtcacgaaatgacagcattattcacatccttgtggaggtgaccacagccccgggtactgttcacagctacctgggctcccctttctggatccaccaggctgtgcgcctccccaccccaaacttgcactggagggagatctccagtgggcatctggaattggagtggcagcacccatcgtcctgggcagcccaagagacctgttatcaactccgatacacaggagaaggccatcaggactggaaggtgctggagccgcctctcggggcccgaggagggaccctggagctgcgcccgcgatctcgctaccgtttacagctgcgcgccaggctcaacggccccacctaccaaggtccctggagctcgtggtcggacccaactagggtggagaccgccaccgagaccgcctggatctccttggtgaccgctctgcatctagtgctgggcctcagcgccgtcctgggcctgctgctgctgaggtggcagtttcctgcacactacaggagactgaggcatgccctgtggccctcacttccagacctgcaccgggtcctaggccagtaccttagggacactgcagccctgagcccgcccaaggccacagtctcagatacctgtgaagaagtggaacccagcctccttgaaatcctccccaagtcctcagagaggactcctttgcccctgtgttcctcccaggcccagatggactaccgaagattgcagccttcttgcctggggaccatgcccctgtctgtgtgcccacccatggctgagtcagggtcctgctgtaccacccacattgccaaccattcctacctaccactaagctattggcagcagccttga

SEQ ID NO: 398 - DNA, 2233 bp, Artificial sequence
  A novel predicted alternative spliced variant
atggcgacgtctaatctgttaaagggatgtgcatgcagtctgtctttgggatgataaaggcccagcaaaaattcatcaggctttaaaagaagatattcttgagtttattaagcaggcacaggcacgagtactgagccatcaagatgatacggctttgctaaaagcatatattgttgaatggcgaaagttctttacacaatgtgatattttaccaaaacctttttgtcaactagagattactttaatgggtaaacagggcagcaataaaaaatcaaatgtggaagacagtattgttcgaaagcttatgcttgatacatggaatgagtcaatcttttcaaacataaaaaacagactccaagatagtgcaatgaagctggtacatgctgagagattgggagaagcttttgattctcagctggttattggagtaagagaatcctatgttaacctttgttctaatcctgaggataaacttcaaatttatagggacaattttgagaaggcatacttggattcaacagagagattttatagaacacaagcaccctcgtatttacaaccaaatggtgtacagaattatatgaaatatgcagatgctaaattaaaagaagaagaaaaacgagcactacgttatttagaaacaagacgagaatgtaactccgttgaagcactcatggaatgctgtgtaaatgccctggtgacatcatttaaagagactatcttagctgagtgccaaggcatgatcaagagaaatgaaactgaaaaattacatttaatgttttcattgatggacaaagttcctaatggtatagagccaatgttgaaagacttggaggaacatatcattagtgctggcctggcagatatggtagcagctgctgaaactattactactgactctgagaaatacgttgagcagttacttacactatttaatagatttagtaaactcgtcaaagaagcttttcaagatgatccacgatttcttactgcaagagataaggcgtataaagcagttgttaatgatgctaccatatttaaacttgaattacctttgaagcagaagggggtgggattaaaaactcagcctgaatcaaaatgccctgagctgcttgccaattactgtgacatgttgctaagaaaaacaccattaagcaaaaaactaacctctgaagagattgaagcaaagcttaaagaagtgctcttggtacttaagtatgtacagaacaaagatgtttttatgaggtatcataaagctcatttgacacgacgtcttatattagacatctctgccgatagtgaaattgaagaaaacatggtagagtggctaagagaagttggtatgccagcggattatgtaaacaagcttgctagaatgtttcaggacataaaagtatctgaagatttgaaccaagcttttaaggaaatgcacaaaaataataaattggcattaccagctgattcagttaatataaaaattctgaatgctggcgcctggtcaagaagttctgagaaagtctttgtctcacttcctactgaactggaggacttgataccggaagtagaagaattctacaaaaaaaatcatagtggtagaaaattacattggcatcatctcatgtcaaatggaattataacatttaagaatgaagttggtcaatatgatttggaggtaaccacgtttcagctcgctgtattgtttgcatggaaccaaagacccagagagaaaatcagctttgaaaatcttaagcttgcaactgaactccctgatgctgaacttaggaggactttatggtctttagtagctttcccaaaactcaaacggcaagtttttttgtatgaccctcaagtcaactcacccaaagactttacagaaggtaccctcttctcagtgaaccaggagttcagtttaataaaaaatgcaaaggttcagaaaaggggtaaaatcaacttgattggacgtttgcagctcactacagaaaggatgagagaagaagagaatgaaggaatagttcaactacgaatactaagaacccaggaagctatcatacaaataatgaaaatgagaaagaaaattagtaatgctcagctgcagactgaattagtagaaattttgaaaaacatgttcttgccacaaaagaaaatgataaaagagcaaatagagtggctaatagagcacaaatacatcagaagagatgaatctgatatcaacactttcatatatatggcataa

SEQ ID NO: 399 - DNA, 2249 bp, Artificial sequence
  A novel predicted alternative spliced variant
atggcgacgtctaatctgttaaagaataaaggttctcttcagtttgaagacaaatgggattttatgcgcccgattgttttgaagcttttacgccaggaatctgttacaaaacagcagtggtttgatctgttttcggatgtgcatgcagtctgtctttgggatgataaaggcccagcaaaaattcatcaggctttaaaagaagatattcttgagtttattaagcaggcacaggcacgagtactgagccatcaagatgatacggctttgctaaaagcatatattgttgaatggcgaaagttctttacacaatgtgatattttaccaaaacctttttgtcaactagagattactttaatgggtaaacagggcagcaataaaaaatcaaatgtggaagacagtattgttcgaaagcttatgcttgatacatggaatgagtcaatcttttcaaacataaaaaacagactccaagatagtgcaatgaagctggtacatgctgagagattgggagaagcttttgattctcagctggttattggagtaagagaatcctatgttaacctttgttctaatcctgaggataaacttcaaatttatagggacaattttgagaaggcatacttggattcaacagagagattttatagaacacaagcaccctcgtatttacaaccaaatggtgtacagaattatatgaaatatgcagatgctaaattaaaagaagaagaaaaacgagcactacgttatttagaaacaagacgagaatgtaactccgttgaagcaaattacatttaatgttttcattgatggacaaagttcctaatggtatagagccaatgttgaaagacttggaggaacatatcattagtgctggcctggcagatatggtagcagctgctgaaactattactactgactctgagaaatacgttgagcagttacttacactatttaatagatttagtaaactcgtcaaagaagcttttcaagatgatccacgatttcttactgcaagagataaggcgtataaagcagttgttaatgatgctaccatatttaaacttgaattacctttgaagcagaagggggtgggattaaaaactcagcctgaatcaaaatgccctgagctgcttgccaattactgtgacatgttgctaagaaaaacaccattaagcaaaaaactaacctctgaagagattgaagcaaagcttaaagaagtgctcttggtacttaagtatgtacagaacaaagatgtttttatgaggtatcataaagctcatttgacacgacgtcttatattagacatctctgccgatagtgaaattgaagaaaacatggtagagtggctaagagaagttggtatgccagcggattatgtaaacaagcttgctagaatgtttcaggacataaaagtatctgaagatttgaaccaagcttttaaggaaatgcacaaaaataataaattggcattaccagctgattcagttaatataaaaattctgaatgctggcgcctggtcaagaagttctgagaaagtctttgtctcacttcctactgaactggaggacttgataccggaagtagaagaattctacaaaaaaaatcatagtggtagaaaattacattggcatcatctcatgtcaaatggaattataacatttaagaatgaagttggtcaatatgatttggaggtaaccacgtttcagctcgctgtattgtttgcatggaaccaaagacccagagagaaaatcagctttgaaaatcttaagcttgcaactgaactccctgatgctgaacttaggaggactttatggtctttagtagctttcccaaaactcaaacggcaagtttttttgtatgaccctcaagtcaactcacccaaagactttacagaaggtaccctcttctcagtgaaccaggagttcagtttaataaaaaatgcaaaggttcagaaaaggggtaaaatcaacttgattggacgtttgcagctcactacagaaaggatgagagaagaagagaatgaaggaatagttcaactacgaatactaagaacccaggaagctatcatacaaataatgaaaatgagaaagaaaattagtaatgctcagctgcagactgaattagtagaaattttgaaaaacatgttcttgccacaaaagaaaatgataaaagagcaaatagagtggctaatagagcacaaatacatcagaagagatgaatctgatatcaacactttcatatatatggcataa

SEQ ID NO: 400 - DNA, 1517 bp, Artificial sequence
  A novel predicted alternative spliced variant
atgctgctgcgctcgaagcctgcgctgccgccgccgctgatgctgctgctcctggggccgctgggtcccctctcccctggcgccctgccccgacctgcgcaagcacaggacgtcgtggacctggacttcttcacccaggagccgctgcacctggtgagcccctcgttcctgtccgtcaccattgacgccaacctggccacggacccgcggttcctcatcctcctgggttctccaaagcttcgtaccttggccagaggcttgtctcctgcgtacctgaggtttggtggcaccaagacagacttcctaattttcgatcccaagaaggaatcaacctttgaagagagaagttactggcaatctcaagtcaaccaggatatttgcaaatatggatccatccctcctgatgtggaggagaagttacggttggaatggccctaccaggagcaattgctactccgagaacactaccagaaaaagttcaagaacagcacctactcaagaagctctgtagatgtgctatacacttttgcaaactgctcaggactggacttgatctttggcctaaatgcgttattaagaacagcagatttgcagtggaacagttctaatgctcagttgctcctggactactgctcttccaaggggtataacatttcttgggaactaggcaatgaacctaacagtttccttaagaaggctgatattttcatcaatgggtcgcagttaggagaagattttattcaattgcataaacttctaagaaagtccaccttcaaaaatgcaaaactctatggtcctgatgttggtcagcctcgaagaaagacggctaagatgctgaagagcttcctgaaggctggtggagaagtgattgattcagttacatggcatcactactatttgaatggacggactgctaccagggaagattttctaaaccctgatgtattggacatttttatttcatctgtgcaaaaagttttccaggtggttgagagcaccaggcctggcaagaaggtctggttaggagaaacaagctctgcatatggaggcggagcgcccttgctatccgacacctttgcagctggctttatgattattggctatctcttctgttcaagaaattggtgggcaccaaggtgttaatggcaagcgtgcaaggttcaaagagaaggaagcttcgagtataccttcattgcacaaacactgacaatccaaggtataaagaaggagatttaactctgtatgccataaacctccataatgtcaccaagtacttgcggttaccctatcctttttctaacaagcaagtggataaataccttctaagacctttgggacctcatggattactttccaaatctgtccaactcaatggtctaactctaaagatggtggatgatcaaaccttgccacctttaatggaaaaacctctccggccaggaagttcactgggcttgccagctttctcatatagtttttttgtgataagaaatgccaaagttgctgcttgcatctga

SEQ ID NO: 401 - DNA, 1607 bp, Artificial sequence
  A novel predicted alternative spliced variant
atgagggtgctttgtgccttccctgaagccatgccctccagcaactcccgcccccccgcgtgcctagccccgggggctctctacttggctctgttgctccatctctccctttcctcccaggctggagacaggagacccttgcctgtagacagagctgcaggtttgaaggaaaagaccctgattctacttgatgtgagcaccaagaacccagtcaggacagtcaatgagaacttcctctctctgcagctggatccgtccatcattcatgatggctggctcgatttcctaagctccaagcgcttggtgaccctggcccggggactttcgcccgcctttctgcgcttcgggggcaaaaggaccgacttcctgcagttccagaacctgaggaacccggcgaaaagccgcgggggcccgggcccggattactatctcaaaaactatgaggatgacattgttcgaagtgatgttgccttagataaacagaaaggctgcaagattgcccagcaccctgatgttatgctggagctccaaagggagaaggcagctcagatgcatctggttcttttaaaggagcaattctccaatacttacagtaatctcatattaacagccaggtctctagacaaactttataactttgctgattgctctggactccacctgatatttgctctaaatgcactgcgtcgtaatcccaataactcctggaacagttctagtgccctgagtctgttgaagtacagcgccagcaaaaagtacaacatttcttgggaactgggtaatgattcatgaaggtggcaggaagtacagtagatgcagttacctggcaacattgctacattgatggccgggtggtcaaggtgatggacttcctgaaaactcgcctgttagacacactctctgaccagattaggaaaattcagaaagtggttaatacatacactccaggaaagaagatttggcttgaaggtgtggtgaccacctcagctggaggcacaaacaatctatccgattcctatgctgcaggattcttatggttgaacactttaggaatgctggccaatcagggcattgatgtcgtgatacggcactcattttttgaccatggatacaatcacctcgtggaccagaattttaacccattaccagactactggctctctctcctctacaagcgcctgatcggccccaaagtcttggctgtgcatgtggctgggctccagcggaagccacggcctggccgagtgatccgggacaaactaaggatttatgctcactgcacaaaccaccacaaccacaactacgttcgtgggtccattacactttttatcatcaacttgcatcgatcaagaaagaaaatcaagctggctgggactctcagagacaagctggttcaccagtacctgctgcagccctatgggcaggagggcctaaagtccaagtcagtgcaactgaatggccagcccttagtgatggtggacgacgggaccctcccagaattgaagccccgcccccttcgggccggccggacattggtcatccctccagtcaccatgggcttttttgtggtcaagaatgtcaatgctttggcctgccgctaccgataa

SEQ ID NO: 402 - DNA, 1731 bp, Artificial sequence
  A novel predicted alternative spliced variant
atgagggtgctttgtgccttccctgaagccatgccctccagcaactcccgcccccccgcgtgcctagccccgggggctctctacttggctctgttgctccatctctccctttcctcccaggctggagacaggagacccttgcctgtagacagagctgcaggtttgaaggaaaagaccctgattctacttgatgtgagcaccaagaacccagtcaggacagtcaatgagaacttcctctctctgcagctggatccgtccatcattcatgatggctggctcgatttcctaagctccaagcgcttggtgaccctggcccggggactttcgcccgcctttctgcgcttcgggggcaaaaggaccgacttcctgcagttccagaacctgaggaacccggcgaaaagccgcgggggcccgggcccggattactatctcaaaaactatgaggatgacattgttcgaagtgatgttgccttagataaacagaaaggctgcaagattgcccagcaccctgatgttatgctggagctccaaagggagaaggcagctcagatgcatctggttcttttaaaggagcaattctccaatacttacagtaatctcatattaacagccaggtctctagacaaactttataactttgctgattgctctggactccacctgatatttgctctaaatgcactgcgtcgtaatcccaataactcctggaacagttctagtgccctgagtctgttgaagtacagcgccagcaaaaagtacaacatttcttgggaactgggtaatgagccaaataactatcggaccatgcatggccgggcagtaaatggcagccagttgggaaaggattacatccagctgaagagcctgttgcagcccatccggatttattccagagccagcttatatggccctaatattgggcggccgaggaagaatgtcatcgccctcctagatggttgctacattgatggccgggtggtcaaggtgatggacttcctgaaaactcgcctgttagacacactctctgaccagattaggaaaattcagaaagtggttaatacatacactccaggaaagaagatttggcttgaaggtgtggtgaccacctcagctggaggcacaaacaatctatccgattcctatgctgcaggattcttatggttgaacactttaggaatgctggccaatcagggcattgatgtcgtgatacggcactcattttttgaccatggatacaatcacctcgtggaccagaattttaacccattaccagactactggctctctctcctctacaagcgcctgatcggccccaaagtcttggctgtgcatgtggctgggctccagcggaagccacggcctggccgagtgatccgggacaaactaaggatttatgctcactgcacaaaccaccacaaccacaactacgttcgtgggtccattacactttttatcatcaacttgcatcgatcaagaaagaaaatcaagctggctgggactctcagagacaagctggttcaccagtacctgctgcagccctatgggcaggagggcctaaagtccaagtcagtgcaactgaatggccagcccttagtgatggtggacgacgggaccctcccagaattgaagccccgcccccttcgggccggccggacattggtcatccctccagtcaccatgggcttttttgtggtcaagaatgtcaatgctttggcctgccgctaccgataa

SEQ ID NO: 403 - DNA, 1685 bp, Artificial sequence
  A novel predicted alternative spliced variant
atgagggtgctttgtgccttccctgaagccatgccctccagcaactcccgcccccccgcgtgcctagccccgggggctctctacttggctctgttgctccatctctccctttcctcccaggctggagacaggagacccttgcctgtagacagagctgcaggtttgaaggaaaagaccctgattctacttgatgtgagcaccaagaacccagtcaggacagtcaatgagaacttcctctctctgcagctggatccgtccatcattcatgatggctggctcgatttcctaagctccaagcgcttggtgaccctggcccggggactttcgcccgcctttctgcgcttcgggggcaaaaggaccgacttcctgcagttccagaacctgaggaacccggcgaaaagccgcgggggcccgggcccggattactatctcaaaaactatgaggatgacattgttcgaagtgatgttgccttagataaacagaaaggctgcaagattgcccagcaccctgatgttatgctggagctccaaagggagaaggcagctcagatgcatctggttcttttaaaggagcaattctccaatacttacagtaatctcatattaacagccaggtctctagacaaactttataactttgctgattgctctggactccacctgatatttgctctaaatgcactgcgtcgtaatcccaataactcctggaacagttctagtgccctgagtctgttgaagtacagcgccagcaaaaagtacaacatttcttgggaactgggtaatgagccaaataactatcggaccatgcatggccgggcagtaaatggcagccagttgggaaaggattacatccagctgaagagcctgttgcagcccatccggatttattccagagccagcttatatggccctaatattgggcggccgaggaagaatgtcatcgccctcctagatggattcatgaaggtggcaggaagtacagtagatgcagttacctggcaacagtggttaatacatacactccaggaaagaagatttggcttgaaggtgtggtgaccacctcagctggaggcacaaacaatctatccgattcctatgctgcaggattcttatggttgaacactttaggaatgctggccaatcagggcattgatgtcgtgatacggcactcattttttgaccatggatacaatcacctcgtggaccagaattttaacccattaccagactactggctctctctcctctacaagcgcctgatcggccccaaagtcttggctgtgcatgtggctgggctccagcggaagccacggcctggccgagtgatccgggacaaactaaggatttatgctcactgcacaaaccaccacaaccacaactacgttcgtgggtccattacactttttatcatcaacttgcatcgatcaagaaagaaaatcaagctggctgggactctcagagacaagctggttcaccagtacctgctgcagccctatgggcaggagggcctaaagtccaagtcagtgcaactgaatggccagcccttagtgatggtggacgacgggaccctcccagaattgaagccccgcccccttcgggccggccggacattggtcatccctccagtcaccatgggcttttttgtggtcaagaatgtcaatgctttggcctgccgctaccgataa

SEQ ID NO: 404 - DNA, 1672 bp, Artificial sequence
  A novel predicted alternative spliced variant
atgagggtgctttgtgccttccctgaagccatgccctccagcaactcccgcccccccgcgtgcctagccccgggggctctctacttggctctgttgctccatctctccctttcctcccaggctggagacaggagacccttgcctgtagacagagctgcaggtttgaaggaaaagaccctgattctacttgatgtgagcaccaagaacccagtcaggacagtcaatgagaacttcctctctctgcagctggatccgtccatcattcatgatggctggctcgatttcctaagctccaagcgcttggtgaccctggcccggggactttcgcccgcctttctgcgcttcgggggcaaaaggaccgacttcctgcagttccagaacctgaggaacccggcgaaaagccgcgggggcccgggcccggattactatctcaaaaactatgaggatgacattgttcgaagtgatgttgccttagataaacagaaaggctgcaagattgcccagcaccctgatgttatgctggagctccaaagggagaaggcagctcagatgcatctggttcttttaaaggagcaattctccaatacttacagtaatctcatattaacagccaggtctctagacaaactttataactttgctgattgctctggactccacctgatatttgctctaaatgcactgcgtcgtaatcccaataactcctggaacagttctagtgccctgagtctgttgaagtacagcgccagcaaaaagtacaacatttcttgggaactgggtaatgagccaaataactatcggaccatgcatggccgggcagtaaatggcagccagttgggaaaggattacatccagctgaagagcctgttgcagcccatccggatttattccagagccagcttatatggccctaatattgggcggccgaggaagaatgtcatcgccctcctagatggattcatgaaggtggcaggaagtacagtagatgcagttacctggcaacattgctacattgatggccgggtggtcaaggtgatggacttcctgaaaactcgcctgttagacacactctctgaccagattaggaaaattcagaaaatggttgaacactttaggaatgctggccaatcagggcattgatgtcgtgatacggcactcattttttgaccatggatacaatcacctcgtggaccagaattttaacccattaccagactactggctctctctcctctacaagcgcctgatcggccccaaagtcttggctgtgcatgtggctgggctccagcggaagccacggcctggccgagtgatccgggacaaactaaggatttatgctcactgcacaaaccaccacaaccacaactacgttcgtgggtccattacactttttatcatcaacttgcatcgatcaagaaagaaaatcaagctggctgggactctcagagacaagctggttcaccagtacctgctgcagccctatgggcaggagggcctaaagtccaagtcagtgcaactgaatggccagcccttagtgatggtggacgacgggaccctcccagaattgaagccccgcccccttcgggccggccggacattggtcatccctccagtcaccatgggcttttttgtggtcaagaatgtcaatgctttggcctgccgctaccgataa

SEQ ID NO: 405 - DNA, 1664 bp, Artificial sequence
  A novel predicted alternative spliced variant
atgagggtgctttgtgccttccctgaagccatgccctccagcaactcccgcccccccgcgtgcctagccccgggggctctctacttggctctgttgctccatctctccctttcctcccaggctggagacaggagacccttgcctgtagacagagctgcaggtttgaaggaaaagaccctgattctacttgatgtgagcaccaagaacccagtcaggacagtcaatgagaacttcctctctctgcagctggatccgtccatcattcatgatggctggctcgatttcctaagctccaagcgcttggtgaccctggcccggggactttcgcccgcctttctgcgcttcgggggcaaaaggaccgacttcctgcagttccagaacctgaggaacccggcgaaaagccgcgggggcccgggcccggattactatctcaaaaactatgaggatgacattgttcgaagtgatgttgccttagataaacagaaaggctgcaagattgcccagcaccctgatgttatgctggagctccaaagggagaaggcagctcagatgcatctggttcttttaaaggagcaattctccaatacttacagtaatctcatattaacagccaggtctctagacaaactttataactttgctgattgctctggactccacctgatatttgctctaaatgcactgcgtcgtaatcccaataactcctggaacagttctagtgccctgagtctgttgaagtacagcgccagcaaaaagtacaacatttcttgggaactgggtaatgagccaaataactatcggaccatgcatggccgggcagtaaatggcagccagttgggaaaggattacatccagctgaagagcctgttgcagcccatccggatttattccagagccagcttatatggccctaatattgggcggccgaggaagaatgtcatcgccctcctagatggattcatgaaggtggcaggaagtacagtagatgcagttacctggcaacattgctacattgatggccgggtggtcaaggtgatggacttcctgaaaactcgcctgttagacacactctctgaccagattaggaaaattcagaaagtggttaatacatacactccaggaaagaagatttggcttgaaggtgtggtgaccacctcagctggaggcacaaacaatctatccgattcctatgctgcaggattcttgactactggctctctctcctctacaagcgcctgatcggccccaaagtcttggctgtgcatgtggctgggctccagcggaagccacggcctggccgagtgatccgggacaaactaaggatttatgctcactgcacaaaccaccacaaccacaactacgttcgtgggtccattacactttttatcatcaacttgcatcgatcaagaaagaaaatcaagctggctgggactctcagagacaagctggttcaccagtacctgctgcagccctatgggcaggagggcctaaagtccaagtcagtgcaactgaatggccagcccttagtgatggtggacgacgggaccctcccagaattgaagccccgcccccttcgggccggccggacattggtcatccctccagtcaccatgggcttttttgtggtcaagaatgtcaatgctttggcctgccgctaccgataa

SEQ ID NO: 406 - DNA, 1633 bp, Artificial sequence
  A novel predicted alternative spliced variant
atgagggtgctttgtgccttccctgaagccatgccctccagcaactcccgcccccccgcgtgcctagccccgggggctctctacttggctctgttgctccatctctccctttcctcccaggctggagacaggagacccttgcctgtagacagagctgcaggtttgaaggaaaagaccctgattctacttgatgtgagcaccaagaacccagtcaggacagtcaatgagaacttcctctctctgcagctggatccgtccatcattcatgatggctggctcgatttcctaagctccaagcgcttggtgaccctggcccggggactttcgcccgcctttctgcgcttcgggggcaaaaggaccgacttcctgcagttccagaacctgaggaacccggcgaaaagccgcgggggcccgggcccggattactatctcaaaaactatgaggatgacattgttcgaagtgatgttgccttagataaacagaaaggctgcaagattgcccagcaccctgatgttatgctggagctccaaagggagaaggcagctcagatgcatctggttcttttaaaggagcaattctccaatacttacagtaatctcatattaacagccaggtctctagacaaactttataactttgctgattgctctggactccacctgatatttgctctaaatgcactgcgtcgtaatcccaataactcctggaacagttctagtgccctgagtctgttgaagtacagcgccagcaaaaagtacaacatttcttgggaactgggtaatgagccaaataactatcggaccatgcatggccgggcagtaaatggcagccagttgggaaaggattacatccagctgaagagcctgttgcagcccatccggatttattccagagccagcttatatggccctaatattgggcggccgaggaagaatgtcatcgccctcctagatggattcatgaaggtggcaggaagtacagtagatgcagttacctggcaacattgctacattgatggccgggtggtcaaggtgatggacttcctgaaaactcgcctgttagacacactctctgaccagattaggaaaattcagaaagtggttaatacatacactccaggaaagaagatttggcttgaaggtgtggtgaccacctcagctggaggcacaaacaatctatccgattcctatgctgcaggattcttatggttgaacactttaggaatgctggccaatcagggcattgatgtcgtgatacggcactcattttttgaccatggatacaatcacctcgtggaccagaattttaacccattaccaccacaactacgttcgtgggtccattacactttttatcatcaacttgcatcgatcaagaaagaaaatcaagctggctgggactctcagagacaagctggttcaccagtacctgctgcagccctatgggcaggagggcctaaagtccaagtcagtgcaactgaatggccagcccttagtgatggtggacgacgggaccctcccagaattgaagccccgcccccttcgggccggccggacattggtcatccctccagtcaccatgggcttttttgtggtcaagaatgtcaatgctttggcctgccgctaccgataa

SEQ ID NO: 407 - DNA, 1632 bp, Artificial sequence
  A novel predicted alternative spliced variant
atgagggtgctttgtgccttccctgaagccatgccctccagcaactcccgcccccccgcgtgcctagccccgggggctctctacttggctctgttgctccatctctccctttcctcccaggctggagacaggagacccttgcctgtagacagagctgcaggtttgaaggaaaagaccctgattctacttgatgtgagcaccaagaacccagtcaggacagtcaatgagaacttcctctctctgcagctggatccgtccatcattcatgatggctggctcgatttcctaagctccaagcgcttggtgaccctggcccggggactttcgcccgcctttctgcgcttcgggggcaaaaggaccgacttcctgcagttccagaacctgaggaacccggcgaaaagccgcgggggcccgggcccggattactatctcaaaaactatgaggatgacattgttcgaagtgatgttgccttagataaacagaaaggctgcaagattgcccagcaccctgatgttatgctggagctccaaagggagaaggcagctcagatgcatctggttcttttaaaggagcaattctccaatacttacagtaatctcatattaacagccaggtctctagacaaactttataactttgctgattgctctggactccacctgatatttgctctaaatgcactgcgtcgtaatcccaataactcctggaacagttctagtgccctgagtctgttgaagtacagcgccagcaaaaagtacaacatttcttgggaactgggtaatgagccaaataactatcggaccatgcatggccgggcagtaaatggcagccagttgggaaaggattacatccagctgaagagcctgttgcagcccatccggatttattccagagccagcttatatggccctaatattgggcggccgaggaagaatgtcatcgccctcctagatggattcatgaaggtggcaggaagtacagtagatgcagttacctggcaacattgctacattgatggccgggtggtcaaggtgatggacttcctgaaaactcgcctgttagacacactctctgaccagattaggaaaattcagaaagtggttaatacatacactccaggaaagaagatttggcttgaaggtgtggtgaccacctcagctggaggcacaaacaatctatccgattcctatgctgcaggattcttatggttgaacactttaggaatgctggccaatcagggcattgatgtcgtgatacggcactcattttttgaccatggatacaatcacctcgtggaccagaattttaacccattaccagactactggctctctctcctctacaagcgcctgatcggccccaaagtcttggctgtgcatgtggctgggctccagcggaagccacggcctggccgagtgatccgggacaaactaaggatttatgctcactgcacaaaccaccacaagtcagtgcaactgaatggccagcccttagtgatggtggacgacgggaccctcccagaattgaagccccgcccccttcgggccggccggacattggtcatccctccagtcaccatgggcttttttgtggtcaagaatgtcaatgctttggcctgccgctaccgataa

SEQ ID NO: 408 - DNA, 2091 bp, Artificial sequence
  A novel predicted alternative spliced variant
atgggcaagtcagaaagtcagatggatataactgatatcaacactccaaagccaaagaagaaacagcgatggactcgactggagatcagcctctcggtccttgtcctgctcctcaccatcatagctgtgagaatgatcgcactctatgcaacctacgatgatggtatttgcaagtcatcagactgcataaaatcagatgtccttcaagaacccaaaactgaagatatagtagcagtgcagaaagcaaaagcattgtacaggtcttgtataaatgaatctgctattgatagcagaggtggagaacctctactcaaactgttaccagacatatatgggtggccagtagcaacagaaaactgggagcaaaaatatggtgcttcttggacagctgaaaaagctattgcacaactgaattctaaatatgggaaaaaagtccttattaatttgtttgttggcactgatgataagaattctgtgaatcatgtaattcatattgaccaacctcgacttggcctcccttctagagattactatgaatgcactggaatctataaagaggcttgtacagcatatgtggattttatgatttctgtggccagattgattcgtcaggaagaaagattgcccatcgatgaaaaccagcttgctttggaaatgaataaagttatggaattggaaaaagaaattgccaatgctacggctaaacctgaagatcgaaatgatccaatgcttctgtataacaagatgagattggcccagatccaaaataacttttcactagagatcaatgggaagccattcagctggttgaatttcacaaatgaaatcatgtcaactgtgaatattagtattacaaatgaggaagatgtggttgtttatgctccagaatatttaaccaaacttaagcccattcttaccaaatattctgccagagatcttcaaaatttaatgtcctggagattcataatggatcttgtaagcagcctcagccgaacctacaaggagtccagaaatgctttccgcaaggccctttatggtacaacctcagaaacagcaacttggagacgttgtgcaaactatgtcaatgggaatatggaaaatgctgtggggaggctttatgtggaagcagcatttgctggagagagtaaacatgtggtcgaggatttgattgcacagatccgagaagtttttattcagactttagatgacctcacttggatggatgccgagacaaaaaagagagctgaagaaaaggccttagcaattaaagaaaggatcggctatcctgatgacattgtttcaaatgataacaaactgaataatgagtacctcgagttgaactacaaagaagatgaatacttcgagaacataattcaaaatttgaaattcagccaaagtaaacaactgaagaagctccgagaaaaggtggacaaagatgagtggataagtggagcagctgtagtcaatgcattttactcttcaggaagaaatcagatagtcttcccagccggcattctgcagccccccttctttagtgcccagcagtccaactcattgaactatgggggcatcggcatggtcataggacacgaaatcacccatggcttcgatgacaatggcagaaactttaacaaagatggagacctcgttgactggtggactcaacagtctgcaagtaactttaaggagcaatcccagtgcatggtgtatcagtatggaaacttttcctgggacctggcaggtggacagcaccttaatggaattaatacactgggagaaaacattgctgataatggaggtcttggtcaagcatacagagcctatcagaattatattaaaaagaatggcgaagaaaaattacttcctggacttgacctaaatcacaaacaactatttttcttgaactttgcacaggtgtggtgtggaacctataggccagagtatgcggttaactccattaaaacagatgtgcacagtccaggcaatttcaggattattgggactttgcagaactctgcagagttttcagaagcctttcactgccgcaagaattcatacatgaatccagaaaagaagtgccgggtttggtga

SEQ ID NO: 409 - DNA, 2134 bp, Artificial sequence
  A novel predicted alternative spliced variant
atgggcaagtcagaaagtcagatggatataactgatatcaacactccaaagccaaagaagaaacagcgatggactcgactggagatcagcctctcggtccttgtcctgctcctcaccatcatagctgtgagaatgatcgcactctatgcaacctacgatgatggtatttgcaagtcatcagactgcataaaatcagctgctcgactgatccaaaacatggatgccaccactgagccttgtagagactttttcaaatatgcttgcggaggctggttgaaacgtaatgtcattcccgagaccagctcccgttacggcaactttgacattttaagagatgaactagaagtcgttttgaaagatgtccttcaagaacccaaaactgaagatatagtagcagtgcagaaagcaaaagcattgtacaggtcttgtataaatgaatctgctattgatagcagaggtggagaacctctactcaaactgttaccagacatatatgggtggccagtagcaacagaaaactgggagcaaaaatatgattgaccaacctcgacttggcctcccttctagagattactatgaatgcactggaatctataaagaggcttgtacagcatatgtggattttatgatttctgtggccagattgattcgtcaggaagaaagattgcccatcgatgaaaaccagcttgctttggaaatgaataaagttatggaattggaaaaagaaattgccaatgctacggctaaacctgaagatcgaaatgatccaatgcttctgtataacaagatgagattggcccagatccaaaataacttttcactagagatcaatgggaagccattcagctggttgaatttcacaaatgaaatcatgtcaactgtgaatattagtattacaaatgaggaagatgtggttgtttatgctccagaatatttaaccaaacttaagcccattcttaccaaatattctgccagagatcttcaaaatttaatgtcctggagattcataatggatcttgtaagcagcctcagccgaacctacaaggagtccagaaatgctttccgcaaggccctttatggtacaacctcagaaacagcaacttggagacgttgtgcaaactatgtcaatgggaatatggaaaatgctgtggggaggctttatgtggaagcagcatttgctggagagagtaaacatgtggtcgaggatttgattgcacagatccgagaagtttttattcagactttagatgacctcacttggatggatgccgagacaaaaaagagagctgaagaaaaggccttagcaattaaagaaaggatcggctatcctgatgacattgtttcaaatgataacaaactgaataatgagtacctcgagttgaactacaaagaagatgaatacttcgagaacataattcaaaatttgaaattcagccaaagtaaacaactgaagaagctccgagaaaaggtggacaaagatgagtggataagtggagcagctgtagtcaatgcattttactcttcaggaagaaatcagatagtcttcccagccggcattctgcagccccccttctttagtgcccagcagtccaactcattgaactatgggggcatcggcatggtcataggacacgaaatcacccatggcttcgatgacaatggcagaaactttaacaaagatggagacctcgttgactggtggactcaacagtctgcaagtaactttaaggagcaatcccagtgcatggtgtatcagtatggaaacttttcctgggacctggcaggtggacagcaccttaatggaattaatacactgggagaaaacattgctgataatggaggtcttggtcaagcatacagagcctatcagaattatattaaaaagaatggcgaagaaaaattacttcctggacttgacctaaatcacaaacaactatttttcttgaactttgcacaggtgtggtgtggaacctataggccagagtatgcggttaactccattaaaacagatgtgcacagtccaggcaatttcaggattattgggactttgcagaactctgcagagttttcagaagcctttcactgccgcaagaattcatacatgaatccagaaaagaagtgccgggtttggtga

SEQ ID NO: 410 - DNA, 2118 bp, Artificial sequence
  A novel predicted alternative spliced variant
atgggcaagtcagaaagtcagatggatataactgatatcaacactccaaagccaaagaagaaacagcgatggactcgactggagatcagcctctcggtccttgtcctgctcctcaccatcatagctgtgagaatgatcgcactctatgcaacctacgatgatggtatttgcaagtcatcagactgcataaaatcagctgctcgactgatccaaaacatggatgccaccactgagccttgtagagactttttcaaatatgcttgcggaggctggttgaaacgtaatgtcattcccgagaccagctcccgttacggcaactttgacattttaagagatgaactagaagtcgttttgaaagatgtccttcaagaacccaaaactgaagatatagtagcagtgcagaaagcaaaagcattgtacaggtcttgtataaatgaatctgctattgatagcagaggtggagaacctctactcaaactgttaccagacatatatgggtggccagtagcaacagaaaactgggagcaaaaatatggtgcttcttggacagctgaaaaagctattgcacaactgaattctaaatatgggaaaaaagtccttattaatttgtttgttggcactgatgataagaattctgtgaatcatgtaattcatattgaccaacctcgacttggcctcccttctagagattactatgaatgcactggaatctataaagaggctacggctaaacctgaagatcgaaatgatccaatgcttctgtataacaagatgagattggcccagatccaaaataacttttcactagagatcaatgggaagccattcagctggttgaatttcacaaatgaaatcatgtcaactgtgaatattagtattacaaatgaggaagatgtggttgtttatgctccagaatatttaaccaaacttaagcccattcttaccaaatattctgccagagatcttcaaaatttaatgtcctggagattcataatggatcttgtaagcagcctcagccgaacctacaaggagtccagaaatgctttccgcaaggccctttatggtacaacctcagaaacagcaacttggagacgttgtgcaaactatgtcaatgggaatatggaaaatgctgtggggaggctttatgtggaagcagcatttgctggagagagtaaacatgtggtcgaggatttgattgcacagatccgagaagtttttattcagactttagatgacctcacttggatggatgccgagacaaaaaagagagctgaagaaaaggccttagcaattaaagaaaggatcggctatcctgatgacattgtttcaaatgataacaaactgaataatgagtacctcgagttgaactacaaagaagatgaatacttcgagaacataattcaaaatttgaaattcagccaaagtaaacaactgaagaagctccgagaaaaggtggacaaagatgagtggataagtggagcagctgtagtcaatgcattttactcttcaggaagaaatcagatagtcttcccagccggcattctgcagccccccttctttagtgcccagcagtccaactcattgaactatgggggcatcggcatggtcataggacacgaaatcacccatggcttcgatgacaatggcagaaactttaacaaagatggagacctcgttgactggtggactcaacagtctgcaagtaactttaaggagcaatcccagtgcatggtgtatcagtatggaaacttttcctgggacctggcaggtggacagcaccttaatggaattaatacactgggagaaaacattgctgataatggaggtcttggtcaagcatacagagcctatcagaattatattaaaaagaatggcgaagaaaaattacttcctggacttgacctaaatcacaaacaactatttttcttgaactttgcacaggtgtggtgtggaacctataggccagagtatgcggttaactccattaaaacagatgtgcacagtccaggcaatttcaggattattgggactttgcagaactctgcagagttttcagaagcctttcactgccgcaagaattcatacatgaatccagaaaagaagtgccgggtttggtga

SEQ ID NO: 411 - DNA, 2116 bp, Artificial sequence
  A novel predicted alternative spliced variant
atgggcaagtcagaaagtcagatggatataactgatatcaacactccaaagccaaagaagaaacagcgatggactcgactggagatcagcctctcggtccttgtcctgctcctcaccatcatagctgtgagaatgatcgcactctatgcaacctacgatgatggtatttgcaagtcatcagactgcataaaatcagctgctcgactgatccaaaacatggatgccaccactgagccttgtagagactttttcaaatatgcttgcggaggctggttgaaacgtaatgtcattcccgagaccagctcccgttacggcaactttgacattttaagagatgaactagaagtcgttttgaaagatgtccttcaagaacccaaaactgaagatatagtagcagtgcagaaagcaaaagcattgtacaggtcttgtataaatgaatctgctattgatagcagaggtggagaacctctactcaaactgttaccagacatatatgggtggccagtagcaacagaaaactgggagcaaaaatatggtgcttcttggacagctgaaaaagctattgcacaactgaattctaaatatgggaaaaaagtccttattaatttgtttgttggcactgatgataagaattctgtgaatcatgtaattcatattgaccaacctcgacttggcctcccttctagagattactatgaatgcactggaatctataaagaggcttgtacagcatatgtggattttatgatttctgtggccagattgattcgtcaggaagaaagattgcccatcgatgaaaaccagcttgctttggaaatgaataaagttatggaattggaaaaagaaattgccaatgctacggctaaacctgaagatcgaaatgatccaatgcttctgtataacaagatgagattggcccagatccaaaataacttttcactagagatcaatgggaagagatcttcaaaatttaatgtcctggagattcataatggatcttgtaagcagcctcagccgaacctacaaggagtccagaaatgctttccgcaaggccctttatggtacaacctcagaaacagcaacttggagacgttgtgcaaactatgtcaatgggaatatggaaaatgctgtggggaggctttatgtggaagcagcatttgctggagagagtaaacatgtggtcgaggatttgattgcacagatccgagaagtttttattcagactttagatgacctcacttggatggatgccgagacaaaaaagagagctgaagaaaaggccttagcaattaaagaaaggatcggctatcctgatgacattgtttcaaatgataacaaactgaataatgagtacctcgagttgaactacaaagaagatgaatacttcgagaacataattcaaaatttgaaattcagccaaagtaaacaactgaagaagctccgagaaaaggtggacaaagatgagtggataagtggagcagctgtagtcaatgcattttactcttcaggaagaaatcagatagtcttcccagccggcattctgcagccccccttctttagtgcccagcagtccaactcattgaactatgggggcatcggcatggtcataggacacgaaatcacccatggcttcgatgacaatggcagaaactttaacaaagatggagacctcgttgactggtggactcaacagtctgcaagtaactttaaggagcaatcccagtgcatggtgtatcagtatggaaacttttcctgggacctggcaggtggacagcaccttaatggaattaatacactgggagaaaacattgctgataatggaggtcttggtcaagcatacagagcctatcagaattatattaaaaagaatggcgaagaaaaattacttcctggacttgacctaaatcacaaacaactatttttcttgaactttgcacaggtgtggtgtggaacctataggccagagtatgcggttaactccattaaaacagatgtgcacagtccaggcaatttcaggattattgggactttgcagaactctgcagagttttcagaagcctttcactgccgcaagaattcatacatgaatccagaaaagaagtgccgggtttggtga

SEQ ID NO: 412 - DNA, 2253 bp, Artificial sequence
  A novel predicted alternative spliced variant
atgggcaagtcagaaagtcagatggatataactgatatcaacactccaaagccaaagaagaaacagcgatggactcgactggagatcagcctctcggtccttgtcctgctcctcaccatcatagctgtgagaatgatcgcactctatgcaacctacgatgatggtatttgcaagtcatcagactgcataaaatcagctgctcgactgatccaaaacatggatgccaccactgagccttgtagagactttttcaaatatgcttgcggaggctggttgaaacgtaatgtcattcccgagaccagctcccgttacggcaactttgacattttaagagatgaactagaagtcgttttgaaagatgtccttcaagaacccaaaactgaagatatagtagcagtgcagaaagcaaaagcattgtacaggtcttgtataaatgaatctgctattgatagcagaggtggagaacctctactcaaactgttaccagacatatatgggtggccagtagcaacagaaaactgggagcaaaaatatggtgcttcttggacagctgaaaaagctattgcacaactgaattctaaatatgggaaaaaagtccttattaatttgtttgttggcactgatgataagaattctgtgaatcatgtaattcatattgaccaacctcgacttggcctcccttctagagattactatgaatgcactggaatctataaagaggcttgtacagcatatgtggattttatgatttctgtggccagattgattcgtcaggaagaaagattgcccatcgatgaaaaccagcttgctttggaaatgaataaagttatggaattggaaaaagaaattgccaatgctacggctaaacctgaagatcgaaatgatccaatgcttctgtataacaagatgagattggcccagatccaaaataacttttcactagagatcaatgggaagccattcagctggttgaatttcacaaatgaaatcatgtcaactgtgaatattagtattacaaatgaggaagatgtggttgtttatgctccagaatatttaaccaaacttaagcccattcttaccaaatattctgccagagatcttcaaaatttaatgtcctggagattcataatggatcttgtaagcagcctcagccgaacctacaaggagtccagaaatgctttccgcaaggccctttatggtacaacctcagaaacagcaacttggagacgttgtgcaaactatgtcaatgggaatatggaaaatgctgtggggaggctttatgtggaagcagcatttgctggagagagtaaacatgtggtcgaggatttgattgcacagatccgagaagtttttattcagactttagatgacctcacttggatggatgccgagacaaaaaagagagctgaagaaaaggccttagcaattaaagaaaggatcggctatcctgatgacattgtttcaaatgataacaaactgaataatgagtacctcgagttgaactacaaagaagatgaatacttcgagaacataattcaaaatttgaaattcagccaaagtaaacaactgaagaagctccgagaaaaggtggacaaagatgagtggataagtggagcagctgtagtcaatgcattttactcttcaggaagaaatcagatagtcttcccagccggcattctgcagccccccttctttagtgcccagcagtccaactcattgaactatgggggcatcggcatggtcataggacacgaaatcacccatggcttcgatgacaatggcagaaactttaacaaagatggagacctcgttgactggtggactcaacagtctgcaagtaactttaaggagcaatcccagtgcatggtgtatcagtatggaaacttttcctgggacctggcaggtggacagcaccttaatggaattaatacactgggagaaaacattgctgataatggaggtcttggtcaagcatacagagcctatcagaattatattaaaaagaatggcgaagaaaaattacttcctggacttgacctaaatcacaaacaactatttttcttgaactttgcacaggtgtggtgtggaacctataggccagagtatgcggttaactccattaaaacagatgtgcacagtccaggcaatttcaggattattgggactttgcagaactctgcagagttttcagaagcctttcactgccgcaagaattcatacatgaatccagaaaagaagtgccgggtttggtga

SEQ ID NO: 413 - DNA, 2149 bp, Artificial sequence
  A novel predicted alternative spliced variant
atgggcaagtcagaaagtcagatggatataactgatatcaacactccaaagccaaagaagaaacagcgatggactcgactggagatcagcctctcggtccttgtcctgctcctcaccatcatagctgtgagaatgatcgcactctatgcaacctacgatgatggtatttgcaagtcatcagactgcataaaatcagctgctcgactgatccaaaacatggatgccaccactgagccttgtagagactttttcaaatatgcttgcggaggctggttgaaacgtaatgtcattcccgagaccagctcccgttacggcaactttgacattttaagagatgaactagaagtcgttttgaaagatgtccttcaagaacccaaaactgaagatatagtagcagtgcagaaagcaaaagcattgtacaggtcttgtataaatgaatctgctattgatagcagaggtggagaacctctactcaaactgttaccagacatatatgggtggccagtagcaacagaaaactgggagcaaaaatatggtgcttcttggacagctgaaaaagctattgcacaactgaattctaaatatgggaaaaaagtccttattaatttgtttgttggcactgatgataagaattctgtgaatcatgtaattcatattgaccaacctcgacttggcctcccttctagagattactatgaatgcactggaatctataaagaggcttgtacagcatatgtggattttatgatttctgtggccagattgattcgtcaggaagaaagattgcccatcgatgaaaaccagcttgctttggaaatgaataaagttatggaattggaaaaagaaattgccaatgctacggctaaacctgaagatcgaaatgatccaatgcttctgtataacaagatgagattggcccagatccaaaataacttttcactagagatcaatgggaagccattcagctggttgaatttcacaaatgaaatcatgtcaactgtgaatattagtattacaaatgaggaagatgtggttgtttatgctccagaatatttaaccaaacttaagcccattcttaccaaatattctgccagagatcttcaaaatttaatgtcctggagattcataatggatcttgtaagcagcctcagccgaacctacaaggagtccagaaatgctttccgcaaggccctttatggtacaacctcagaaacagcaacttggagacgttgtgcaaactatgtcaatgggaatatggaaaatgctgtggggaggctttatgtggaagcagcatttgctggagagagtaaacatgtggtcgaggatttgattgcacagatccgagaagtttttattcagactttagatgacctcacttggatggatgccgagacaaaaaagagagctgaagaaaaggccttagcaattaaagaaaggatcggctatcctgatgacattgtttcaaatgataacaaactgaataatgagtacctcgaggtggataagtggagcagctgtagtcaatgcattttactcttcaggaagaaatcagatagtcttcccagccggcattctgcagccccccttctttagtgcccagcagtccaactcattgaactatgggggcatcggcatggtcataggacacgaaatcacccatggcttcgatgacaatggcagaaactttaacaaagatggagacctcgttgactggtggactcaacagtctgcaagtaactttaaggagcaatcccagtgcatggtgtatcagtatggaaacttttcctgggacctggcaggtggacagcaccttaatggaattaatacactgggagaaaacattgctgataatggaggtcttggtcaagcatacagagcctatcagaattatattaaaaagaatggcgaagaaaaattacttcctggacttgacctaaatcacaaacaactatttttcttgaactttgcacaggtgtggtgtggaacctataggccagagtatgcggttaactccattaaaacagatgtgcacagtccaggcaatttcaggattattgggactttgcagaactctgcagagttttcagaagcctttcactgccgcaagaattcatacatgaatccagaaaagaagtgccgggtttggtga

SEQ ID NO: 414 - DNA, 1951 bp, Artificial sequence
  A novel predicted alternative spliced variant
atgtctgttccatcatcactgagccagtcggccattaatgccaacagccacggaggccccgcactgagcctacccctgcctctgcacgctgcccacaaccagctgctcaacgccaagctgcaggccacagctgtgggacccaaggacctgcgcagcgccatgggggagggtggtgggcctgagccaggccctgccaatgccaagtggctaaaagagggccagaaccagctccggcgggccgccacggcccaccgtgaccagaatcgcaatgtgaccttgaccttggcggaggaggccagccaggagcctgagatggcacccttgggccccaaaggcctgatacacctgtactctgagctggagctctcagctcacaacgcagccaaccgaggcctacgaggacctggcctgatcatcagcactcaagagcaggggccagatgagggagaggagaaggcggccggggaggccgaggaggaggaggaggatgatgatgatgaagaggaggaggaggacttatcttctcccccagggctgcctgagcccctggagagtgtggaggcccctcccaggccccaagcccttacagatggcccccgggaacacagcaagagtgccagcctcctgtttggcatgcggaacagtgcagccagtgatgaggactcaagctgggctaccttatcccagggcagcccctcctatggctccccagaggacacagctcacctggacaggttttgctcatggagaaggctttgaggatggagaattttggaaggatgaacccagtgatgaggccccaatggagctgggactgaaggaacctgaggaggggacgttgaccttcccagctcagagcctcagcccagagccgttgccccaagaggaggagaagcttcccccacggaataccaacccagggatcaagtgtttcgccgtgcgctccctaggctgggtagagatgaccgaggaggagctggcccctggacgcagcagtgtggcagtcaacaattgcatccgtcagctctcttaccacaaaaacaacctgcatgaccccatgtctgggggctggggggaaggaaaggatctgctactgcagctggaggatgagacactaaagctagtggagccacagagccaggcactgctgcacgcccaacccatcatcagcatccgcgtgtggggcgtcgggcgggacagtggaagggactttgcctacgtagctcgtgataagctgacccagatgctcaagtgccacgtgtttcgctgtgaggcacctgccaagaacatcgccaccagcctgcatgagatctgctctaagatcatggccgaacggcgtaatgcccgctgcttggtaaatggactctccctggaccactctaaacttgtggatgtccctttccaagtggaattcccagcgcctaagaatgagttggtccagaagttccaagtctattacctggggaatgtacctgttgctaaacctgttggggtagatgtgattaatggggccctcgagtcagtcctgtcctccagcagccgtgaacaatggaccccaagtcatgtcagtgtggcccctgctaccctcaccatcttgcaccagcagacagaggcagtgctgggagagtgtcgggtgcgtttcctctccttcctggccgtgggcagagatgtccacacgtttgcattcatcatggctgccggcccagcctccttctgctgccacatgttctggtgcgagcccaatgctgccagcctctcagaggctgtgcaggctgcgtgcatgcttcgctaccagaagtgtctggatgcccgttcccaggcctccacctcctgcctcccagcaccccctgctgagtctgtggcacggcgtgtagggtggactgtccgcaggggtgttcagtcgctgtggggctccctgaagcccaaacggctgggggcccataccccatga

SEQ ID NO: 415 - DNA, 1977 bp, Artificial sequence
  A novel predicted alternative spliced variant
atgtctgttccatcatcactgagccagtcggccattaatgccaacagccacggaggccccgcactgagcctacccctgcctctgcacgctgcccacaaccagctgctcaacgccaagctgcaggccacagctgtgggacccaaggacctgcgcagcgccatgggggagggtggtgggcctgagccaggccctgccaatgccaagtggctaaaagagggccagaaccagctccggcgggccgccacggcccaccgtgaccagaatcgcaatgtgaccttgaccttggcggaggaggccagccaggagcctgagatggcacccttgggccccaaaggcctgatacacctgtactctgagctggagctctcagctcacaacgcagccaaccgaggcctacgaggacctggcctgatcatcagcactcaagagcaggggccagatgagggagaggagaaggcggccggggaggccgaggaggaggaggaggatgatgatgatgaagaggaggaggaggacttatcttctcccccagggctgcctgagcccctggagagtgtggaggcccctcccaggccccaagcccttacagatggcccccgggaacacagcaagagtgccagcctcctgtttggcatgcggaacagtgcagccagtgatgaggactcaagctgggctaccttatcccagggcagcccctcctatggctccccagaggacacagattccttctggaaccccaacgccttcgagacggattccgacctgccggctggatggatgagggtccaggacacctcagggacctattactggcacatcccaacagggaccacccagtgggaaccccccggccgggcctccccctcacaggggagcagcccccaagaggagtcccagctcacctggacaggttttgctcatggagaaggctttgaggatggagaattttggaaggatgaacccagtgatgaggccccaatggagctgggactgaaggaacctgaggaggggacgttgaccttcccagctcagagcctcagcccagagccgttgccccaagaggaggagaagcttcccccacggaataccaacccagggatcaagggaaaggatctgctactgcagctggaggatgagacactaaagctagtggagccacagagccaggcactgctgcacgcccaacccatcatcagcatccgcgtgtggggcgtcgggcgggacagtggaagggactttgcctacgtagctcgtgataagctgacccagatgctcaagtgccacgtgtttcgctgtgaggcacctgccaagaacatcgccaccagcctgcatgagatctgctctaagatcatggccgaacggcgtaatgcccgctgcttggtaaatggactctccctggaccactctaaacttgtggatgtccctttccaagtggaattcccagcgcctaagaatgagttggtccagaagttccaagtctattacctggggaatgtacctgttgctaaacctgttggggtagatgtgattaatggggccctcgagtcagtcctgtcctccagcagccgtgaacaatggaccccaagtcatgtcagtgtggcccctgctaccctcaccatcttgcaccagcagacagaggcagtgctgggagagtgtcgggtgcgtttcctctccttcctggccgtgggcagagatgtccacacgtttgcattcatcatggctgccggcccagcctccttctgctgccacatgttctggtgcgagcccaatgctgccagcctctcagaggctgtgcaggctgcgtgcatgcttcgctaccagaagtgtctggatgcccgttcccaggcctccacctcctgcctcccagcaccccctgctgagtctgtggcacggcgtgtagggtggactgtccgcaggggtgttcagtcgctgtggggctccctgaagcccaaacggctgggggcccataccccatga

SEQ ID NO: 416 - DNA, 1999 bp, Artificial sequence
  A novel predicted alternative spliced variant
atgtctgttccatcatcactgagccagtcggccattaatgccaacagccacggaggccccgcactgagcctacccctgcctctgcacgctgcccacaaccagctgctcaacgccaagctgcaggccacagctgtgggacccaaggacctgcgcagcgccatgggggagggtggtgggcctgagccaggccctgccaatgccaagtggctaaaagagggccagaaccagctccggcgggccgccacggcccaccgtgaccagaatcgcaatgtgaccttgaccttggcggaggaggccagccaggagcctgagatggcacccttgggccccaaaggcctgatacacctgtactctgagctggagctctcagctcacaacgcagccaaccgaggcctacgaggacctggcctgatcatcagcactcaagagcaggggccagatgagggagaggagaaggcggccggggaggccgaggaggaggaggaggatgatgatgatgaagaggaggaggaggacttatcttctcccccagggctgcctgagcccctggagagtgtggaggcccctcccaggccccaagcccttacagatggcccccgggaacacagcaagagtgccagcctcctgtttggcatgcggaacagtgcagccagtgatgaggactcaagctgggctaccttatcccagggcagcccctcctatggctccccagaggacacagattccttctggaaccccaacgccttcgagacggattccgacctgccggctggatggatgagggtccaggacacctcagggacctattactggcacatcccaacagggaccacccagtgggaaccccccggccgggcctccccctcacaggggagcagcccccaagaggagtcccagctcacctggacaggttttgctcatggagaaggctttgaggatggagaattttggaaggatgaacccagtgatgaggccccaatggagctgggactgaaggaacctgaggaggggacgttgaccttcccagctcagagcctcagcccagagccgttgccccaagaggaggagaagcttcccccacggaataccaacccagggatcaagtgtttcgccgtgcgctccctaggctgggtagagatgaccgaggaggagctggcccctggacgcagcagtgtggcagtcaacaattgcatccgtcagctctcttaccacaaaaacaacctgcatgaccccatgtctgggggctggggggaaggactttgcctacgtagctcgtgataagctgacccagatgctcaagtgccacgtgtttcgctgtgaggcacctgccaagaacatcgccaccagcctgcatgagatctgctctaagatcatggccgaacggcgtaatgcccgctgcttggtaaatggactctccctggaccactctaaacttgtggatgtccctttccaagtggaattcccagcgcctaagaatgagttggtccagaagttccaagtctattacctggggaatgtacctgttgctaaacctgttggggtagatgtgattaatggggccctcgagtcagtcctgtcctccagcagccgtgaacaatggaccccaagtcatgtcagtgtggcccctgctaccctcaccatcttgcaccagcagacagaggcagtgctgggagagtgtcgggtgcgtttcctctccttcctggccgtgggcagagatgtccacacgtttgcattcatcatggctgccggcccagcctccttctgctgccacatgttctggtgcgagcccaatgctgccagcctctcagaggctgtgcaggctgcgtgcatgcttcgctaccagaagtgtctggatgcccgttcccaggcctccacctcctgcctcccagcaccccctgctgagtctgtggcacggcgtgtagggtggactgtccgcaggggtgttcagtcgctgtggggctccctgaagcccaaacggctgggggcccataccccatga

SEQ ID NO: 417 - DNA, 2042 bp, Artificial sequence
  A novel predicted alternative spliced variant
atgtctgttccatcatcactgagccagtcggccattaatgccaacagccacggaggccccgcactgagcctacccctgcctctgcacgctgcccacaaccagctgctcaacgccaagctgcaggccacagctgtgggacccaaggacctgcgcagcgccatgggggagggtggtgggcctgagccaggccctgccaatgccaagtggctaaaagagggccagaaccagctccggcgggccgccacggcccaccgtgaccagaatcgcaatgtgaccttgaccttggcggaggaggccagccaggagcctgagatggcacccttgggccccaaaggcctgatacacctgtactctgagctggagctctcagctcacaacgcagccaaccgaggcctacgaggacctggcctgatcatcagcactcaagagcaggggccagatgagggagaggagaaggcggccggggaggccgaggaggaggaggaggatgatgatgatgaagaggaggaggaggacttatcttctcccccagggctgcctgagcccctggagagtgtggaggcccctcccaggccccaagcccttacagatggcccccgggaacacagcaagagtgccagcctcctgtttggcatgcggaacagtgcagccagtgatgaggactcaagctgggctaccttatcccagggcagcccctcctatggctccccagaggacacagattccttctggaaccccaacgccttcgagacggattccgacctgccggctggatggatgagggtccaggacacctcagggacctattactggcacatcccaacagggaccacccagtgggaaccccccggccgggcctccccctcacaggggagcagcccccaagaggagtcccagctcacctggacaggttttgctcatggagaaggctttgaggatggagaattttggaaggatgaacccagtgatgaggccccaatggagctgggactgaaggaacctgaggaggggacgttgaccttcccagctcagagcctcagcccagagccgttgccccaagaggaggagaagcttcccccacggaataccaacccagggatcaagtgtttcgccgtgcgctccctaggctgggtagagatgaccgaggaggagctggcccctggacgcagcagtgtggcagtcaacaattgcatccgtcagctctcttaccacaaaaacaacctgcatgaccccatgtctgggggctggggggaaggaaaggatctgctactgcagctggaggatgagacactaaagctagtggagccacagagccaggcactgctgcacgcccaacccatcatcagcatccgcgtgtggggcgtcgggcgggacagtggaagggactttgcctacgtagctcgtgataagctgacccagatgctcaagtgccacgtgtttcgctgtgaggcacctgccaagaacatcgccaccagcctgcatgagatctgctctaagtggaattcccagcgcctaagaatgagttggtccagaagttccaagtctattacctggggaatgtacctgttgctaaacctgttggggtagatgtgattaatggggccctcgagtcagtcctgtcctccagcagccgtgaacaatggaccccaagtcatgtcagtgtggcccctgctaccctcaccatcttgcaccagcagacagaggcagtgctgggagagtgtcgggtgcgtttcctctccttcctggccgtgggcagagatgtccacacgtttgcattcatcatggctgccggcccagcctccttctgctgccacatgttctggtgcgagcccaatgctgccagcctctcagaggctgtgcaggctgcgtgcatgcttcgctaccagaagtgtctggatgcccgttcccaggcctccacctcctgcctcccagcaccccctgctgagtctgtggcacggcgtgtagggtggactgtccgcaggggtgttcagtcgctgtggggctccctgaagcccaaacggctgggggcccataccccatga

SEQ ID NO: 418 - DNA, 2011 bp, Artificial sequence
  A novel predicted alternative spliced variant
atgtctgttccatcatcactgagccagtcggccattaatgccaacagccacggaggccccgcactgagcctacccctgcctctgcacgctgcccacaaccagctgctcaacgccaagctgcaggccacagctgtgggacccaaggacctgcgcagcgccatgggggagggtggtgggcctgagccaggccctgccaatgccaagtggctaaaagagggccagaaccagctccggcgggccgccacggcccaccgtgaccagaatcgcaatgtgaccttgaccttggcggaggaggccagccaggagcctgagatggcacccttgggccccaaaggcctgatacacctgtactctgagctggagctctcagctcacaacgcagccaaccgaggcctacgaggacctggcctgatcatcagcactcaagagcaggggccagatgagggagaggagaaggcggccggggaggccgaggaggaggaggaggatgatgatgatgaagaggaggaggaggacttatcttctcccccagggctgcctgagcccctggagagtgtggaggcccctcccaggccccaagcccttacagatggcccccgggaacacagcaagagtgccagcctcctgtttggcatgcggaacagtgcagccagtgatgaggactcaagctgggctaccttatcccagggcagcccctcctatggctccccagaggacacagattccttctggaaccccaacgccttcgagacggattccgacctgccggctggatggatgagggtccaggacacctcagggacctattactggcacatcccaacagggaccacccagtgggaaccccccggccgggcctccccctcacaggggagcagcccccaagaggagtcccagctcacctggacaggttttgctcatggagaaggctttgaggatggagaattttggaaggatgaacccagtgatgaggccccaatggagctgggactgaaggaacctgaggaggggacgttgaccttcccagctcagagcctcagcccagagccgttgccccaagaggaggagaagcttcccccacggaataccaacccagggatcaagtgtttcgccgtgcgctccctaggctgggtagagatgaccgaggaggagctggcccctggacgcagcagtgtggcagtcaacaattgcatccgtcagctctcttaccacaaaaacaacctgcatgaccccatgtctgggggctggggggaaggaaaggatctgctactgcagctggaggatgagacactaaagctagtggagccacagagccaggcactgctgcacgcccaacccatcatcagcatccgcgtgtggggcgtcgggcgggacagtggaagggactttgcctacgtagctcgtgataagctgacccagatgctcaagtgccacgtgtttcgctgtgaggcacctgccaagaacatcgccaccagcctgcatgagatctgctctaagatcatggccgaacggcgtaatgcccgctgcttggtaaatggactctccctggaccactctaaacttgtggatgtccctttccaagtggaattcccagcgcctaagaatgagttggtccagaagttccaagtctattacctggggaatgtacctgttgctaaacctgttgacagaggcagtgctgggagagtgtcgggtgcgtttcctctccttcctggccgtgggcagagatgtccacacgtttgcattcatcatggctgccggcccagcctccttctgctgccacatgttctggtgcgagcccaatgctgccagcctctcagaggctgtgcaggctgcgtgcatgcttcgctaccagaagtgtctggatgcccgttcccaggcctccacctcctgcctcccagcaccccctgctgagtctgtggcacggcgtgtagggtggactgtccgcaggggtgttcagtcgctgtggggctccctgaagcccaaacggctgggggcccataccccatga

SEQ ID NO: 419 - DNA, 485 bp, Artificial sequence
  A novel predicted alternative spliced variant
caaatatgccagaggattatcctgatcagttcgatgatgtcatggattttattcaagccaccattaaaagactgaaaaggtcaccagataaacaaatggcagtgcttcctagaagagagcggaatcggcaggctgcagctgccaacccagagaattccagaggaaaaggtcggagaggccagaggggcaaaaaccggggttgtgtcttaactgcaatacatttaaatgtcactgacttgggtctgggctatgaaaccaaggaggaactgatttttaggtactgcagcggctcttgcgatgcagctgagacaacgtacgacaaaatattgaaaaacttatccagaaatagaaggctggtgagtgacaaagtagggcaggcatgttgcagacccatcgcctttgatgatgacctgtcgtttttagatgataacctggtttaccatattctaagaaagcattccgctaaaaggtgtggatgtatctga

SEQ ID NO: 420 - DNA, 1231 bp, Artificial sequence
  A novel predicted alternative spliced variant
atgcgtccccacctgtcgccgccgctgcagcagctactactgccggtgctgctcgcctgcgccgcgcactcgactggagcccttccccgactatgtgacgtgctacaagtgctgtgggaagagcaagaccagtgcctgcaggaactctccagagagcagacaggagacctgggcacggagcagccagtgccaggttgtgaggggatgtgggacaacataagctgctggccctcttctgtgccgggccggatggtggaggtggaatgcccgagattcctccggatgctcaccagcagaaatggttccttgttccgaaactgcacacaggatggctggtcagaaaccttccccaggcctaatctggcctgtggcgttaatgtgaacgactcttccaacgagaagcggcactcctacctgctgaagctgaaagtcatgtacaccgtgggctacagctcctccctggtcatgctcctggtcgcccttggcatcctctgtgctttccggaggctccactgcactcgcaactacatccacatgcacctgttcgtgtccttcatccttcgtgccctgtccaacttcatcaaggacgccgtgctcttctcctcagatgatgtcacctactgcgatccgcacagggcgggctgcaagctggtcatggtgctgttccagtactgcatcatggccaactactcctggctgctggtggaaggcctctaccttcacacactcctcgccatctccttcttctctgaaagaaagtacctccagggatttgtggcattcggatggggttctccagccatttttgttgctttgtgggctattgccagacactttctggaagatgttgggtgctgggacatcaatgccaacgcatccatctggtggatcattcgtggtcctgtgatcctctccatcctggcgcctggccaggtccactctcctgctgatccccctctttggcatccactacatcgtcttcgccttctccccagaggacgctatggagatccagctgttttttgaactagcccttggctcattccagggactggtggtggccgtcctctactgcttcctcaatggggaggtgcagctggaggttcagaagaagtggcagcaatggcacctccgtgagttcccactgcaccccgtggcctccttcagcaacagcaccaaggccagccacttggagcagagccagggcacctgcaggaccagcatcatctga

SEQ ID NO: 421 - DNA, 751 bp, Artificial sequence
  A novel predicted alternative spliced variant
atgtccaagtctctgaagaagttggtggaggagagccgggagaagaaccagcccgaggtggacatgagtgaccggggcatctccaacatgctggatgtcaacggcctctttaccttatcccatatcacacaactggtcctcagccataacaagctaacaatggtgccaccgaacatcgcagaactgaagaatttggaggtgctcaacttttttaataaccaaatcgaggagctgcccacacagatcagtagccttcagaaactcaaacacctgaaccttggcatgaacaggctgaacactttgccacgaggcttcggctccctgccagctcttgaggttctggacttgacgtacaacaacttgagcgaaaattctcttcctggaaacttcttctacctgactcagccttagggataacgacctgatctcgctgcctaaggaaatcggggagcttacccagcttaaagagctccacattcaggggaaccgcctcaccgttctgcccccagaactaggaaacttggatttaactggccagaagcaggtattcaaagcagagaacaatccctgggtgacccccattgcagaccagttccagcttggcgtgtcccatgtttttgagtatatccgttctgagacatacaaatacctctacggcagacacatgcaggccaacccagaaccaccgaagaagaataatgacaaatcgaaaaagatcagccggaaacccctggcagccaagaacagataa

SEQ ID NO: 422 - DNA, 1467 bp, Artificial sequence
  A novel predicted alternative spliced variant
atgaattgtagagaattacccttgaccctttgggtgcttatatctgtaagcactgcagaatcttgtacttcacgtccccacattactgtggttgaaggggaacctttctatctgaaacattgctcgtgttcacttgcacatgagattgaaacaaccaccaaaagctggtacaaaagcagtggatcacaggaacatgtggagctgaacccaaggagttcctcgagaattgctttgcatgattgtgttttggagttttggccagttgagttgaatgacacaggatcttactttttccaaatgaaaaattatactcagaaatggaaattaaatgtcatcagaagaaataaacacagctgtttcactgaaagacaagtaactagtaaaattgtggaagttaaaaaattttttcagataacctgtgaaaacagttactatcaaacactggtcaacagcacatcattgtataagaactgtaaaaagctactactggagaacaataaaaacccaacgataaagaagaacgccgagtttgaagatcaggggtattactcctgcgtgcatttccttcatcataatggaaaactatttaatatcaccaaaaccttcaatataacaatagtggaagatcgcagtaatatagttccggttcttcttggaccaaagcttaaccatgttgcagtggaattaggaaaaaacgtaaggctcaactgctctgctttgctgaatgaagaggatgtaatttattggatgttcggggaagaaaatggatcggatcctaatatacatgaagagaaagaaatgagaattatgactccagaaggcaaatggcatgcttcaaaagtattgagaattgaaaatattggtgaaagcaatctaaatgttttatataattgcactgtggccagcacgggaggcacagacaccaaaagcttcatcttggtgagaaaagcagacatggctgatatcccaggccacgtcttcacaagaggaatgatcatagctgttttgatcttggtggcagtagtgtgcctagtgactgtgtgtgtcatttatagagttgacttggttctattttatagacatttaacgagaagagatgaaacattaacagctgttgttgatgaaatccactcactgatagagaaaagccgaagactaatcattgtcctaagtaaaagttatatgtctaatgaggtcaggtatgaacttgaaagtggactccatgaagcattggtggaaagaaaaattaaaataatcttaattgaatttacacctgttactgacttcacattcttgccccaatcactaaagcttttgaaatctcacagagttctgaagtggaaggccgataaatctctttcttataactcaaggttctggaagaaccttctttacttaatgcctgcaaaaacagtcaagccaggtagagacgaaccggaagtcttgcctgttctttccgagtcttaa

SEQ ID NO: 423 - DNA, 1067 bp, Artificial sequence
  A novel predicted alternative spliced variant
atgcactactgtgtgctgagcgcttttctgatcctgcatctggtcacggtcgcgctcagcctgtctacctgcagcacactcgatatggaccagttcatgcgcaagaggatcgaggcgatccgcgggcagatcctgagcaagctgaagctcaccagtcccccagaagactatcctgagcccgaggaagtccccccggaggtgatttccatctacaacagcaccagggacttgctccaggagaaggcgagccggagggcggccgcctgcgagcgcgagaggagcgacgaagagtactacgccaaggaggtttacaaaatagacatgccgcccttcttcccctccgaaaatgccatcccgcccactttctacagaccctacttcagaattgttcgatttgacgtctcagcaatggagaagaatgcttccaatttggtgaaagcagagttcagagtctttcgtttgcagaacccaaaagccagagtgcctgaacaacggattgagctatatcagattctcaagtccaaagatttaacatctccaacccagcgctacatcgacagcaaagttgtgaaaacaagagcagaaggcgaatggctctccttcgatgtaactgatgctgttcatgaatggcttcaccataaagacaggaacctgggatttaaaataagcttacactgtccctgctgcacttttgtaccatctaataattacatcatcccaaataaaagtgaagaactagaagcaagatttgcagaaatgtgcaggataattgctgcctacgtccactttacattgatttcaagagggatctagggtggaaatggatacacgaacccaaagggtacaatgccaacttctgtgctggagcatgcccgtatttatggagttcagacactcagcacagcagggtcctgagcttatataataccataaatccagaagcatctgcttctccttgctgcgtgtcccaagatttagaacctctaaccattctctactacattggcaaaacacccaagattgaacagctttctaatatgattgtaaagtcttgcaaatgcagctaa

SEQ ID NO: 424 - DNA, 6153 bp, Artificial sequence
  A novel predicted alternative spliced variant
atgtttaacctaatgaagaaagacaaggacaaagatggcgggcggaaggagaagaaggagaaaaaggagaaaaaggagcggatgtcagcggcagagcttcggagcctggaggagatgagcctgcgacgtggcttcttcaacctgaaccgctcctccaagcgtgaatccaagacgcgcctggaaatctccaaccccatccccatcaaggtggccagcggctctgacctgcacctgactgacattgactccgatagtaaccggggcagcgtcatcctggactcgggccacctaagtacagccagctccagcgatgacctcaagggtgaggagggtagcttccgtggctcggtgctgcagcgggcagccaagttcggctcactggccaagcagaactcacagatgattgtcaagcgcttttccttctcccagcgtagccgggatgagagcgcctcagaaacctcgacgccctcagagcactctgccgccccctcgccacaggtggaggtgaggactctagagggacagctggtgcagcatcctggcccaggcatccctcgaccagggcaccgatcccgagcccctgagctagtgactaaaaagttcccagtcgacctgcgcctgccccccgtggtgcccctgcccccacctaccctccgggagctggagctgcaacgacggcccactggagactttggcttctccctgcggcgcacaaccatgctggatcggggccccgagggccaggcctgtcggcgtgtggtccactttgctgagcctggtgcaggcaccaaggacctggccctggggctggtgccaggagatcgactggtggagattaatgggcacaatgtggagagcaagtccagggatgagattgtggagatgatccggcagtcaggggacagcgtgcggctcaaggtgcagcccattccagagctcagcgagctcagcaggagctggctgcggagcggcgagggacctcgcagggagccatccgatgcgaaaacagaagaacagattgcagcagaagaggcctggaatgagacggagaaggtgtggctggtccatagggacggcttctcactggccagtcaactcaaatctgaggagctcaacttgcctgaggggaaggtgcgtgtgaagctggaccacgatggggccatcctggatgtggatgaggatgacgttgagaaggctaatgctccctcctgcgaccgtctggaggatctggcctcactggtgtacctcaatgagtccagcgtcctgcacaccttgcgccagcgctatggcgctagcctgctgcacacgtatgctggccccagcctgctggttcttggcccccgtggggcccctgctgtgtactctgagaaggtgatgcacatgttcaagggttgtcggcgggaggacatggcaccccacatctatgcagtggcccagaccgcatacagggcgatgctgatgagccgtcaggatcagtcaatcatcctcctgggcagtagtggcagtggcaagaccaccagctgccagcatctggtgcagtacctggccaccatcgcgggcatcagcgggaacaaggtgttttctgtggagaagtggcaggctctgtacaccctcctggaagcctttgggaacagccccaccatcattaatggcaatgccacccgcttctcccagatcctctccctggactttgaccaagctggccaggtggcctcagcctccattcagacaatgcttctggagaagctgcgtgtggctcggcgcccagccagtgaagccacattcaacgtcttctactacctgctggcctgtggggatggcaccctcaggacagagctccacctcaaccacttggcagagaacaatgtgtttgggattgtgccactggccaagcctgaggaaaagcagaaggcagctcagcagtttagtaagctgcaggcggccatgaaggtgctgggcatctcccccgatgaacagaaggcctgctggttcattctggctgccatctaccacctgggggctgcgggagccaccaaagctgggcgcaagcagtttgcccgccatgagtgggcccagaaggctgcgtacctactgggctgcagcctggaggagctgtcctcagccatcttcaagcaccagcacaagggtggcaccctgcagcgctccacctccttccgccagggccccgaggagagtggcctgggagatgggacaggcccgaaactgagtgcactggagtgccttgagggcatggcggccggcctctacagcgagctcttcacccttctcgtctccctggtgaatagggctctcaagtccagccagcactcactctgctccatgatgattgtcgacaccccgggcttccagaaccctgagcagggtgggtcagcccgcggagcctcctttgaggagctgtgccacaactacacccaagaccggctgcagaggctcttccacgagcgcaccttcgtgcaggagttggaaagatacaaggaggagaacatcgagctggcgtttgacgacttggaacccccgacggatgactctgtggctgctgtggaccaggcctcccatcagtccctggtccgctcgctggcccgcacagacgaggcgaggggcctgctctggctattggaagaggaggctctggtgccaggggccagtgaggacaccctcctggagcgccttttctcctattatggcccccaggaaggtgacaaaaaaggccaaagcccccttctgcacagcagcaaaccacaccactttctcctgggccacagccatggcaccaactgggtagagtacaatgtgactggctggctgaactacaccaagcagaacccagccacccagaatgccccccggctcctgcaggactcccagaaaaaaatcatcagcaacctgtttctgggccgcgcaggcagtgccacggtgctctctggctccatcgcgggcctggagggcggctcgcagctggcactgcgccgggccaccagcatgcggaaaacctttaccacaggcatggcggctgtcaaaaagaagtcactgtgcatccagatgaagctacaggtggacgccctcatcgacaccatcaagaagtcaaagctgcattttgtgcactgcttcctgcctgtagctgagggctgggctggggagccccgttccgcctcctcccgccgagtcagcagcagcagtgagctggacctgccctcgggagaccactgcgaggctgggctcctgcagctcgacgtgcccctgctccgcacccagctccgcggctcccgcctgctcgatgccatgcgcatgtaccgccaaggttaccctgaccacatggtgttttccgagttccgccgccgctttgatgtcctggccccgcacctgaccaagaaacacgggcgtaactacatcgtggtggatgaaaggcgggcagtggaggagctgctggagtgcttggatctggagaagagcagctgctgcatgggcctgagccgggtgttcttccgggcgggcaccttggcacggctggaggagcagcgggatgaacaaaccagcaggaacctaaccctgttccaagcagcctgcaggggctacctggcccgccagcacttcaagaagagaaagatccaggacctggccattcgctgtgtacagaagaacatcaagaagaacaaaggggtgaaggactggccctggtggaagctttttaccacagtgaggcccctcatcgaagtacagctgtcagaggagcagatccggaacaaagacgaggagatccagcagctgcggagcaagctcgagaaggcggagaaggagaggaacgagctgcggctcaacagtgaccggctggagagccggatctcagagctgacatcggagctgacagatgagcgtaacacaggagagtccgcctcccagctgctggacgcggagacagcagagaggctccgggctgagaaggagatgaaggaactgcagacccagtacgatgcactgaagaagcagatggaggttatggaaatggaggtgatggaggcccgtctcatccgggcagcggagatcaacggggaagtggatgatgatgatgcaggtggcgagtggcggctgaagtatgagcgggctgtgcgggaggtggacttcaccaagaaacggctccagcaggagtttgaggacaagctggaggtggagcagcagaacaagaggcagctggaacggcggctcggggacctgcaggcagatagtgaggagagtcagcgggctctgcagcagctcaagaagaagtgccagcgactgacggctgagctgcaagacaccaagctgcacctggagggccagcaggtccgcaaccacgaactggagaagaagcagaggaggtttgacagtgagctctcgcaggcgcatgaggaggcccagcgggagaagctgcagcgggagaagctgcagcgggagaaggacatgctcctcgctgaggctttcagcctgaagcagcaactagaggaaaaagacatggacattgcagggttcacccagaaggttgtgtctctagaggcagagctccaggacatttcttcccaagagtccaaggatgaggcttctctggccaaggtcaagaaacagctccgggacctggaggccaaagtcaaggatcaggaagaagagctggatgagcaggcagggaccatccagatgctggaacaggccaagctgcgtctggagatggagatggagcggatgagacagacccattctaaggagatggagagtcgggatgaggaggtggaggaggcccggcagtcgtgtcagaagaagttaaaacagatggaggtgcagctagaggaagagtatgaggacaagcagaaggttctgcgagagaagcgggagctggagggcaagctcgccaccctcagcgaccaggtgaaccggcgggactttgagtcagagaagcggctgcggaaggacctgaagcgcaccaaggccctgctggcagatgcccagctcatgctggaccacctgaagaacagtgctcccagcaagcgagagattgcccagctcaagaaccagctggaggagtcagagttcacctgtgcggcagccgtgaaagcacggaaagcaatggaggtggagatcgaagacctgcacctgcagattgatgacatcgccaaagccaagacagcgctggaggagcagctgagccgccttcagcgtgagaagaatgagatccagaaccggctggaggaagatcaggaagacatgaacgaattgatgaagaagcacaaggctgccgtggctcaggcttcccgggacctggctcagataaatgatctccaagctcagctagaagaagccaacaaagagaagcaggagctgcaggagaagctacaagccctccagagccaggtggagttcctggagcagtccatggtggacaagtccctggtgagcaggcaggaagctaagatacgggagctggagacacgcctggagtttgaaaggacgcaagtgaaacggctggagagcctggctagccgtctcaaggaaaacatggagaagctgactgaggagcgggatcagcgcattgcagccgagaaccgggagaaggaacagaacaagcggctacagaggcagctccgggacaccaaggaggagatgggcgagcttgccaggaaggaggccgaggcgagccgcaagaagcacgaactggagatggatctagaaagcctggaggctgctaaccagagcctgcaggctgacctaaagttggcattcaagcgcatcggggacctgcaggctgccattgaggatgagatggagagtgatgagaatgaggacctcatcaacagtttgcaggacatggtgacaaagtatcagaaaagaaagaataaacttgagggagactctgatgtggactcggagctggaggaccgtgttgacggggtcaagtcctggttgtcaaaaaacaagggaccttccaaggcagcttctgatgatggcagcttaaagagttccagccccaccagctactggaagtcccttgcccctgatcggtcagatgatgagcacgaccctctcgacaacacctccagaccgcgatactcccacagttatctgagtgacagcgacacagaggccaagctgacggagactaacgcatag

SEQ ID NO: 425 - DNA, 6045 bp, Artificial sequence
  A novel predicted alternative spliced variant
atgtttaacctaatgaagaaagacaaggacaaagatggcgggcggaaggagaagaaggagaaaaaggagaaaaaggagcggatgtcagcggcagagcttcggagcctggaggagatgagcctgcgacgtggcttcttcaacctgaaccgctcctccaagcgtgaatccaagacgcgcctggaaatctccaaccccatccccatcaaggtggccagcggctctgacctgcacctgactgacattgactccgatagtaaccggggcagcgtcatcctggactcgggccacctaagtacagccagctccagcgatgacctcaagggtgaggagggtagcttccgtggctcggtgctgcagcgggcagccaagttcggctcactggccaagcagaactcacagatgattgtcaagcgcttttccttctcccagcgtagccgggatgagagcgcctcagaaacctcgacgccctcagagcactctgccgccccctcgccacaggtggaggtgaggactctagagggacagctggtgcagcatcctggcccaggcatccctcgaccagggcaccgatcccgagcccctgagctagtgactaaaaagttcccagtcgacctgcgcctgccccccgtggtgcccctgcccccacctaccctccgggagctggagctgcaacgacggcccactggagactttggcttctccctgcggcgcacaaccatgctggatcggggccccgagggccaggcctgtcggcgtgtggtccactttgctgagcctggtgcaggcaccaaggacctggccctggggctggtgccaggagatcgactggtggagattaatgggcacaatgtggagagcaagtccagggatgagattgtggagatgatccggcagtcaggggacagcgtgcggctcaaggtgcagcccattccagagctcagcgagctcagcaggagctggctgcggagcggcgagggacctcgcagggagccatccgatgcgaaaacagaagaacagattgcagcagaagaggcctggaatgagacggagaaggtgtggctggtccatagggacggcttctcactggccagtcaactcaaatctgaggagctcaacttgcctgaggggaaggtgcgtgtgaagctggaccacgatggggccatcctggatgtggatgaggatgacgttgagaaggctaatgctccctcctgcgaccgtctggaggatctggcctcactggtgtacctcaatgagtccagcgtcctgcacaccttgcgccagcgctatggcgctagcctgctgcacacgtatgctggccccagcctgctggttcttggcccccgtggggcccctgctgtgtactctgagaaggtgatgcacatgttcaagggttgtcggcgggaggacatggcaccccacatctatgcagtggcccagaccgcatacagggcgatgctgatgagccgtcaggatcagtcaatcatcctcctgggcagtagtggcagtggcaagaccaccagctgccagcatctggtgcagtacctggccaccatcgcgggcatcagcgggaacaaggtgttttctgtggagaagtggcaggctctgtacaccctcctggaagcctttgggaacagccccaccatcattaatggcaatgccacccgcttctcccagatcctctccctggactttgaccaagctggccaggtggcctcagcctccattcagacaatgcttctggagaagctgcgtgtggctcggcgcccagccagtgaagccacattcaacgtcttctactacctgctggcctgtggggatggcaccctcaggacagagctccacctcaaccacttggcagagaacaatgtgtttgggattgtgccactggccaagcctgaggaaaagcagaaggcagctcagcagtttagtaagctgcaggcggccatgaaggtgctgggcatctcccccgatgaacagaaggcctgctggttcattctggctgccatctaccacctgggggctgcgggagccaccaaagaagctgctgaagctgggcgcaagcagtttgcccgccatgagtgggcccagaaggctgcgtacctactgggctgcagcctggaggagctgtcctcagccatcttcaagcaccagcacaagggtggcaccctgcagcgctccacctccttccgccagggccccgaggagagtggcctgggagatgggacaggcccgaaactgagtgcactggagtgccttgagggcatggcggccggcctctacagcgagctcttcacccttctcgtctccctggtgaatagggctctcaagtccagccagcactcactctgctccatgatgattgtcgacaccccgggcttccagaaccctgagcagggtgggtcagcccgcggagcctcctttgaggagctgtgccacaactacacccaagaccggctgcagaggctcttccacgagcgcaccttcgtgcaggagttggaaagatacaaggaggagaacatcgagctggcgtttgacgacttggaacccccgacggatgactctgtggctgctgtggaccaggcctcccatcagtccctggtccgctcgctggcccgcacagacgaggcgaggggcctgctctggctattggaagaggaggctctggtgccaggggccagtgaggacaccctcctggagcgccttttctcctattatggcccccaggaaggtgacaaaaaaggccaaagcccccttctgcacagcagcaaaccacaccactttctcctgggccacagccatggcaccaactgggtagagtacaatgtgactggctggctgaactacaccaagcagaacccagccacccagaatgccccccggctcctgcaggactcccagaaaaaaatcatcagcaacctgtttctgggccgcgcaggcagtgccacggtgctctctggctccatcgcgggcctggagggcggctcgcagctggcactgcgccgggccaccagcatgcggaaaacctttaccacaggcatggcggctgtcaaaaagaagtcactgtgcatccagatgaagctacaggtggacgccctcatcgacaccatcaagaagtcaaagctgcattttgtgcactgcttcctgcctgtagctgagggctgggctggggagccccgttccgcctcctcccgccgagtcagcagcagcagtgagctggacctgccctcgggagaccactgcgaggctgggctcctgcagctcgacgtgcccctgctccgcacccagctccgcggctcccgcctgctcgatgccatgcgcatgtaccgccaaggttaccctgaccacatggtgttttccgagttccgccgccgctttgatgtcctggccccgcacctgaccaagaaacacgggcgtaactacatcgtggtggatgaaaggcgggcagtggaggagctgctggagtgcttggatctggagaagagcagctgctgcatgggcctgagccgggtgttcttccgggcgggcaccttggcacggctggaggagcagcgggatgaacaaaccagcaggaacctaaccctgttccaagcagcctgcaggggctacctggcccgccagcacttcaagaagagaaagatccaggacctggccattcgctgtgtacagaagaacatcaagaagaacaaaggggtgaaggactggccctggtggaagctttttaccacagtgaggcccctcatcgaagtacagctgtcagaggagcagatccggaacaaagacgaggagatccagcagctgcggagcaagctcgagaaggcggagaaggagaggaacgagctgcggctcaacagtgaccggctggagagccggacccagtacgatgcactgaagaagcagatggaggttatggaaatggaggtgatggaggcccgtctcatccgggcagcggagatcaacggggaagtggatgatgatgatgcaggtggcgagtggcggctgaagtatgagcgggctgtgcgggaggtggacttcaccaagaaacggctccagcaggagtttgaggacaagctggaggtggagcagcagaacaagaggcagctggaacggcggctcggggacctgcaggcagatagtgaggagagtcagcgggctctgcagcagctcaagaagaagtgccagcgactgacggctgagctgcaagacaccaagctgcacctggagggccagcaggtccgcaaccacgaactggagaagaagcagaggaggtttgacagtgagctctcgcaggcgcatgaggaggcccagcgggagaagctgcagcgggagaagctgcagcgggagaaggacatgctcctcgctgaggctttcagcctgaagcagcaactagaggaaaaagacatggacattgcagggttcacccagaaggttgtgtctctagaggcagagctccaggacatttcttcccaagagtccaaggatgaggcttctctggccaaggtcaagaaacagctccgggacctggaggccaaagtcaaggatcaggaagaagagctggatgagcaggcagggaccatccagatgctggaacaggccaagctgcgtctggagatggagatggagcggatgagacagacccattctaaggagatggagagtcgggatgaggaggtggaggaggcccggcagtcgtgtcagaagaagttaaaacagatggaggtgcagctagaggaagagtatgaggacaagcagaaggttctgcgagagaagcgggagctggagggcaagctcgccaccctcagcgaccaggtgaaccggcgggactttgagtcagagaagcggctgcggaaggacctgaagcgcaccaaggccctgctggcagatgcccagctcatgctggaccacctgaagaacagtgctcccagcaagcgagagattgcccagctcaagaaccagctggaggagtcagagttcacctgtgcggcagccgtgaaagcacggaaagcaatggaggtggagatcgaagacctgcacctgcagattgatgacatcgccaaagccaagacagcgctggaggagcagctgagccgccttcagcgtgagaagaatgagatccagaaccggctggaggaagatcaggaagacatgaacgaattgatgaagaagcacaaggctgccgtggctcaggcttcccgggacctggctcagataaatgatctccaagctcagctagaagaagccaacaaagagaagcaggagctgcaggagaagctacaagccctccagagccaggtggagttcctggagcagtccatggtggacaagtccctggtgagcaggcaggaagctaagatacgggagctggagacacgcctggagtttgaaaggacgcaagtgaaacggctggagagcctggctagccgtctcaaggaaaacatggagaagctgactgaggagcgggatcagcgcattgcagccgagaaccgggagaaggaacagaacaagcggctacagaggcagctccgggacaccaaggaggagatgggcgagcttgccaggaaggaggccgaggcgagccgcaagaagcacgaactggagatggatctagaaagcctggaggctgctaaccagagcctgcaggctgacctaaagttggcattcaagcgcatcggggacctgcaggctgccattgaggatgagatggagagtgatgagaatgaggacctcatcaacagtttgcaggacatggtgacaaagtatcagaaaagaaagaataaacttgagggagactctgatgtggactcggagctggaggaccgtgttgacggggtcaagtcctggttgtcaaaaaacaagggaccttccaaggcagcttctgatgatggcagcttaaagagttccagccccaccagctactggaagtcccttgcccctgatcggtcagatgatgagcacgaccctctcgacaacacctccagaccgcgatactcccacagttatctgagtgacagcgacacagaggccaagctgacggagactaacgcatag

SEQ ID NO: 426 - DNA, 6051 bp, Artificial sequence
  A novel predicted alternative spliced variant
atgtttaacctaatgaagaaagacaaggacaaagatggcgggcggaaggagaagaaggagaaaaaggagaaaaaggagcggatgtcagcggcagagcttcggagcctggaggagatgagcctgcgacgtggcttcttcaacctgaaccgctcctccaagcgtgaatccaagacgcgcctggaaatctccaaccccatccccatcaaggtggccagcggctctgacctgcacctgactgacattgactccgatagtaaccggggcagcgtcatcctggactcgggccacctaagtacagccagctccagcgatgacctcaagggtgaggagggtagcttccgtggctcggtgctgcagcgggcagccaagttcggctcactggccaagcagaactcacagatgattgtcaagcgcttttccttctcccagcgtagccgggatgagagcgcctcagaaacctcgacgccctcagagcactctgccgccccctcgccacaggtggaggtgaggactctagagggacagctggtgcagcatcctggcccaggcatccctcgaccagggcaccgatcccgagcccctgagctagtgactaaaaagttcccagtcgacctgcgcctgccccccgtggtgcccctgcccccacctaccctccgggagctggagctgcaacgacggcccactggagactttggcttctccctgcggcgcacaaccatgctggatcggggccccgagggccaggcctgtcggcgtgtggtccactttgctgagcctggtgcaggcaccaaggacctggccctggggctggtgccaggagatcgactggtggagattaatgggcacaatgtggagagcaagtccagggatgagattgtggagatgatccggcagtcaggggacagcgtgcggctcaaggtgcagcccattccagagctcagcgagctcagcaggagctggctgcggagcggcgagggacctcgcagggagccatccgatgcgaaaacagaagaacagattgcagcagaagaggcctggaatgagacggagaaggtgtggctggtccatagggacggcttctcactggccagtcaactcaaatctgaggagctcaacttgcctgaggggaaggtgcgtgtgaagctggaccacgatggggccatcctggatgtggatgaggatgacgttgagaaggctaatgctccctcctgcgaccgtctggaggatctggcctcactggtgtacctcaatgagtccagcgtcctgcacaccttgcgccagcgctatggcgctagcctgctgcacacgtatgctggccccagcctgctggttcttggcccccgtggggcccctgctgtgtactctgagaaggtgatgcacatgttcaagggttgtcggcgggaggacatggcaccccacatctatgcagtggcccagaccgcatacagggcgatgctgatgagccgtcaggatcagtcaatcatcctcctgggcagtagtggcagtggcaagaccaccagctgccagcatctggtgcagtacctggccaccatcgcgggcatcagcgggaacaaggtgttttctgtggagaagtggcaggctctgtacaccctcctggaagcctttgggaacagccccaccatcattaatggcaatgccacccgcttctcccagatcctctccctggactttgaccaagctggccaggtggcctcagcctccattcagacaatgcttctggagaagctgcgtgtggctcggcgcccagccagtgaagccacattcaacgtcttctactacctgctggcctgtggggatggcaccctcaggacagagctccacctcaaccacttggcagagaacaatgtgtttgggattgtgccactggccaagcctgaggaaaagcagaaggcagctcagcagtttagtaagctgcaggcggccatgaaggtgctgggcatctcccccgatgaacagaaggcctgctggttcattctggctgccatctaccacctgggggctgcgggagccaccaaagaagctgctgaagctgggcgcaagcagtttgcccgccatgagtgggcccagaaggctgcgtacctactgggctgcagcctggaggagctgtcctcagccatcttcaagcaccagcacaagggtggcaccctgcagcgctccacctccttccgccagggccccgaggagagtggcctgggagatgggacaggcccgaaactgagtgcactggagtgccttgagggcatggcggccggcctctacagcgagctcttcacccttctcgtctccctggtgaatagggctctcaagtccagccagcactcactctgctccatgatgattgtcgacaccccgggcttccagaaccctgagcagggtgggtcagcccgcggagcctcctttgaggagctgtgccacaactacacccaagaccggctgcagaggctcttccacgagcgcaccttcgtgcaggagttggaaagatacaaggaggagaacatcgagctggcgtttgacgacttggaacccccgacggatgactctgtggctgctgtggaccaggcctcccatcagtccctggtccgctcgctggcccgcacagacgaggcgaggggcctgctctggctattggaagaggaggctctggtgccaggggccagtgaggacaccctcctggagcgccttttctcctattatggcccccaggaaggtgacaaaaaaggccaaagcccccttctgcacagcagcaaaccacaccactttctcctgggccacagccatggcaccaactgggtagagtacaatgtgactggctggctgaactacaccaagcagaacccagccacccagaatgccccccggctcctgcaggactcccagaaaaaaatcatcagcaacctgtttctgggccgcgcaggcagtgccacggtgctctctggctccatcgcgggcctggagggcggctcgcagctggcactgcgccgggccaccagcatgcggaaaacctttaccacaggcatggcggctgtcaaaaagaagtcactgtgcatccagatgaagctacaggtggacgccctcatcgacaccatcaagaagtcaaagctgcattttgtgcactgcttcctgcctgtagctgagggctgggctggggagccccgttccgcctcctcccgccgagtcagcagcagcagtgagctggacctgccctcgggagaccactgcgaggctgggctcctgcagctcgacgtgcccctgctccgcacccagctccgcggctcccgcctgctcgatgccatgcgcatgtaccgccaaggttaccctgaccacatggtgttttccgagttccgccgccgctttgatgtcctggccccgcacctgaccaagaaacacgggcgtaactacatcgtggtggatgaaaggcgggcagtggaggagctgctggagtgcttggatctggagaagagcagctgctgcatgggcctgagccgggtgttcttccgggcgggcaccttggcacggctggaggagcagcgggatgaacaaaccagcaggaacctaaccctgttccaagcagcctgcaggggctacctggcccgccagcacttcaagaagagaaagatccaggacctggccattcgctgtgtacagaagaacatcaagaagaacaaaggggtgaaggactggccctggtggaagctttttaccacagtgaggcccctcatcgaagtacagctgtcagaggagcagatccggaacaaagacgaggagatccagcagctgcggagcaagctcgagaaggcggagaaggagaggaacgagctgcggctcaacagtgaccggctggagagccggatctcagagctgacatcggagctgacagatgagcgtaacacaggagagtccgcctcccagctgctggacgcggagacagcagagaggctccgggctgagaaggagatgaaggaactgcagacccagtacgatgcactgaagaagcagatggaggttatggaaatggaggtgatggaggcccgtctcatccgggcagcggagatcaacggggaagtggatgatgatgatgcaggtggcgagtggcggctgaagtatgagcgggctgtgcgggaggtggacttcaccaagaaacggctccagcaggagtttgaggacaagctggaggtggagcagcagaacaagaggcagctggaacggcggctcggggacctgcaggcagatagtgaggagagtcagcgggctctgcagcagctcaagaagaagtgccagcgactgacggctgagctgcaagacaccaagctgcacctggagggccagcaggtccgcaaccacgaactggagaagaagcagaggaggtttgacagtgagctctcgcaggcgcatgaggaggcccagcgggagaagctgcagcgggagaagctgcagcgggagaaggacatgctcctcgctgaggctttcagcctgaagcagcaactagaggaaaaagacatggacattgcagggttcacccagaaggttgtgtctctagaggcagagctccaggacatttcttcccaagagtccaaggatgaggcttctctggccaaggtcaagaaacagctccgggacctggaggccaaagtcaaggatcaggaagaagagctggatgagcaggcagggaccatccagatgctggaacaggccaagctgcgtctggagatggagatggagcggatgagacagacccattctaaggagatggagagtcgggatgaggaggtggaggaggcccggcagtcgtgtcagaagaagttaaaacagatggaggtgcagctagaggaagagtatgaggacaagcagaaggttctgcgagagaagcgggagctggagggcaagctcgccaccctcagcgaccaggtgaaccggcgggactttgagtcagagaagcggctgcggaaggacctgaagcgcaccaaggccctgctggcagatgcccagctcatgctggaccacctgaagaacagtgctcccagcaagcgagagattgcccagctcaagaaccagctggaggagcagctgagccgccttcagcgtgagaagaatgagatccagaaccggctggaggaagatcaggaagacatgaacgaattgatgaagaagcacaaggctgccgtggctcaggcttcccgggacctggctcagataaatgatctccaagctcagctagaagaagccaacaaagagaagcaggagctgcaggagaagctacaagccctccagagccaggtggagttcctggagcagtccatggtggacaagtccctggtgagcaggcaggaagctaagatacgggagctggagacacgcctggagtttgaaaggacgcaagtgaaacggctggagagcctggctagccgtctcaaggaaaacatggagaagctgactgaggagcgggatcagcgcattgcagccgagaaccgggagaaggaacagaacaagcggctacagaggcagctccgggacaccaaggaggagatgggcgagcttgccaggaaggaggccgaggcgagccgcaagaagcacgaactggagatggatctagaaagcctggaggctgctaaccagagcctgcaggctgacctaaagttggcattcaagcgcatcggggacctgcaggctgccattgaggatgagatggagagtgatgagaatgaggacctcatcaacagtttgcaggacatggtgacaaagtatcagaaaagaaagaataaacttgagggagactctgatgtggactcggagctggaggaccgtgttgacggggtcaagtcctggttgtcaaaaaacaagggaccttccaaggcagcttctgatgatggcagcttaaagagttccagccccaccagctactggaagtcccttgcccctgatcggtcagatgatgagcacgaccctctcgacaacacctccagaccgcgatactcccacagttatctgagtgacagcgacacagaggccaagctgacggagactaacgcatag

SEQ ID NO: 427 - DNA, 1569 bp, Artificial sequence
  A novel predicted alternative spliced variant
atgacacttctgtggtgtgtagtgagtctctacttttatggaatcctgcaaagtgatgcctcagaacgctgcgatgactggggactagacaccatgaggcaaatccaagtgtttgaagatgagccagctcgcatcaagtgcccactctttgaacacttcttgaaattcaactacagcacagcccattcagctggccttactctgatctggtattggactaggcaggaccgggaccttgaggagccaattaacttccgcctccccgagaaccgcattagtaaggagaaagatgtgctgtggttccggcccactctcctcaatgacactggcaactatacctgcatgttaaggaacactacatattgcagcaaagttgcatttcccttggaagttgttcaaaaagacagctgtttcaattcccccatgaaactcccagtgcataaactgtatatagaatatggcattcagaggatcacttgtccaaatgtagatggatattttccttccagtgtcaaaccgactatcacttggtatatgggctgttataaaatacagaattttaataatgtaatacccgaaggtatgaacttgagtttcctcattgccttaatttcaaataatggaaattacacatgtgttgttacatatccagaaaatggacgtacgtttcatctcaccaggactctgactgtaaaggtagtaggctctccaaaaaatgcagtgccccctgtgatccattcacctaatgatcatgtggtctatgagaaagaaccaggagaggagctactcattccctgtacggtctattttagttttctgatggattctcgcaatgaggtttggtggaccattgatggaaaaaaacctgatgacatcactattgatgtcaccattaacgaaagtataagtcatagtagaacagaagatgaaacaagaactcagattttgagcatcaagaaagttacctctgaggatctcaagcgcagctatgtctgtcatgctagaagtgccaaaggcgaagttgccaaagcagccaaggtgaagcagaaagtgccagctccaagatacacagtggaactggcttgtggttttggagccacagtcctgctagtggtgattctcattgttgtttaccatgtttactggctagagatggtcctattttaccgggctcattttggaacagatgaaaccattttagttgtcacagatgagactttgagcttcattcagaaaagcagacgcctcctggttgttctaagccccaactacgtgctccagggaacccaagccctcctggagctcaaggctggcctagaaaatatggcctctcggggcaacatcaacgtcattttagtacagtacaaagctgtgaaggaaacgaaggtgaaagagctgaagagggctaagacggtgctcacggtcattaaatggaaaggggaaaaatccaagtatccacagggcaggttctggaagcagctgcaggtggccatgccagtgaagaaaagtcccaggcggtctagcagtgatgagcagggcctctcgtattcatctttgaaaaatgtatga

SEQ ID NO: 428 - DNA, 1904 bp, Artificial sequence
  A novel predicted alternative spliced variant
atgaaagctccgattccacacttgattctcttatacgctacttttactcagagtttgaaggttgtgaccaaaagaggctccgccgatggatgcactgactggtctatcgatatcaagaaatatcaagttttggtgggagagcctgttcgaatcaaatgtgcactcttttatggttatatcagaacaaattactcccttgcccaaagtgctggactcagtttgatgtggtacaaaagttctggtcctggagactttgaagagccaatagcctttgacggaagtagaatgagcaaagaagaagactccatttggttccggccaacattgctacaggacagtggtctctacgcctgtgtcatcaggaatgcaggacaaaaacatggaggccaagtattgtattcaaaagagatactctgcttataagagaagtcagagaagatgacattggaaattatacctgtgaattaaaatatggaggctttgttgtgagaagaactactgaattaactgttacagcccctctgactgataagccacccaagcttttgtatcctatggaaagtaaactgacaattcaggagacccagctgggtgactctgctaatctaacctgcagagctttctttgggtacagcggagatgtcagtcctttaatttactggatgaaaggagaaaaatttattgaagatctggatgaaaatcgagtttgggaaagtgacattagaattcttaaggagcatcttggggaacaggaagtttccatctcattaattgtggactctgtggaagaaggtgacttgggaaattactcctgttatgttgaaaatggaaatggacgtcgacacgccagcgttctccttcataaacgagagctaatgtacacagtggaacttgctggaggccttggtgctatactcttgctgcttgtatgtttggtgaccatctacaagtgttacaagatagaaatcatgctcttctacaggaatcattttggagctgaagagctcgatggagacaataaagattatgatgcatacttatcatacaccaaagtggatcctgaccagtggaatcaagagactggggaagaagaacgttttgcccttgaaatcctacctgatatgcttgaaaagcattatggatataagttgtttataccagatagagatttaatcccaactggaacatacattgaagatgtggcaagatgtgtagatcaaagcaagcggctgattattgtcatgaccccaaattacgtagttagaaggggctggagcatctttgagctggaaaccagacttcgaaatatgcttgtgactggagaaattaaagtgattctaattgaatgcagtgaactgagaggaattatgaactaccaggaggtggaggccctgaagcacaccatcaagctcctgacggtcattaaatggcatggaccaaaatgcaacaagttgaactccaagttctggaaacgtttacagtatgaaatgccttttaagaggatagaacccattacacatgagcaggctttagatgtcagtgagcaagggccttttggggagctgcagactgtctcggccatttccatggccgcggccacctccacagctctagccactgcccatccagatctccgttctacctttcacaacacgtaccattcacaaatgcgtcagaaacactactaccgaagctatgagtacgacgtacctcctaccggcaccctgcctcttacctccataggcaatcagcatacctactgtaacatccctatgacactcatcaacgggcagcggccacagacaaaatcgagcagggagcagaatccagatgaggcccacacaaacagtgccatcctgccgctgttgccaagggagaccagtatatccagtgtgatatggtga

SEQ ID NO: 429 - DNA, 1937 bp, Artificial sequence
  A novel predicted alternative spliced variant
atgaaagctccgattccacacttgattctcttatacgctacttttactcagagtttgaaggttgtgaccaaaagaggctccgccgatggatgcactgactggtctatcgatatcaagaaatatcaagttttggtgggagagcctgttcgaatcaaatgtgcactcttttatggttatatcagaacaaattactcccttgcccaaagtgctggactcagtttgatgtggtacaaaagttctggtcctggagactttgaagagccaatagcctttgacggaagtagaatgagcaaagaagaagactccatttggttccggccaacattgctacaggacagtggtctctacgcctgtgtcatcagaaactccacttactgtatgaaagtatccatctcactgacagtgggtgaaaatgacactggactctgctataattccaagatgaagtattttgaaaaagctgaacttagcaaaagcaaggaaatttcatgccgtgacatagaggattttctactgccaaccagagaacctgaaatcctttggtacaagcccctctgactgataagccacccaagcttttgtatcctatggaaagtaaactgacaattcaggagacccagctgggtgactctgctaatctaacctgcagagctttctttgggtacagcggagatgtcagtcctttaatttactggatgaaaggagaaaaatttattgaagatctggatgaaaatcgagtttgggaaagtgacattagaattcttaaggagcatcttggggaacaggaagtttccatctcattaattgtggactctgtggaagaaggtgacttgggaaattactcctgttatgttgaaaatggaaatggacgtcgacacgccagcgttctccttcataaacgagagctaatgtacacagtggaacttgctggaggccttggtgctatactcttgctgcttgtatgtttggtgaccatctacaagtgttacaagatagaaatcatgctcttctacaggaatcattttggagctgaagagctcgatggagacaataaagattatgatgcatacttatcatacaccaaagtggatcctgaccagtggaatcaagagactggggaagaagaacgttttgcccttgaaatcctacctgatatgcttgaaaagcattatggatataagttgtttataccagatagagatttaatcccaactggaacatacattgaagatgtggcaagatgtgtagatcaaagcaagcggctgattattgtcatgaccccaaattacgtagttagaaggggctggagcatctttgagctggaaaccagacttcgaaatatgcttgtgactggagaaattaaagtgattctaattgaatgcagtgaactgagaggaattatgaactaccaggaggtggaggccctgaagcacaccatcaagctcctgacggtcattaaatggcatggaccaaaatgcaacaagttgaactccaagttctggaaacgtttacagtatgaaatgccttttaagaggatagaacccattacacatgagcaggctttagatgtcagtgagcaagggccttttggggagctgcagactgtctcggccatttccatggccgcggccacctccacagctctagccactgcccatccagatctccgttctacctttcacaacacgtaccattcacaaatgcgtcagaaacactactaccgaagctatgagtacgacgtacctcctaccggcaccctgcctcttacctccataggcaatcagcatacctactgtaacatccctatgacactcatcaacgggcagcggccacagacaaaatcgagcagggagcagaatccagatgaggcccacacaaacagtgccatcctgccgctgttgccaagggagaccagtatatccagtgtgatatggtga

SEQ ID NO: 430 - DNA, 2016 bp, Artificial sequence
  A novel predicted alternative spliced variant
atgaaagctccgattccacacttgattctcttatacgctacttttactcagagtttgaaggttgtgaccaaaagaggctccgccgatggatgcactgactggtctatcgatatcaagaaatatcaagttttggtgggagagcctgttcgaatcaaatgtgcactcttttatggttatatcagaacaaattactcccttgcccaaagtgctggactcagtttgatgtggtacaaaagttctggtcctggagactttgaagagccaatagcctttgacggaagtagaatgagcaaagaagaagactccatttggttccggccaacattgctacaggacagtggtctctacgcctgtgtcatcagaaactccacttactgtatgaaagtatccatctcactgacagtgggtgaaaatgacactggactctgctataattccaagatgaagtattttgaaaaagctgaacttagcaaaagcaaggaaatttcatgccgtgacatagaggattttctactgccaaccagagaacctgaaatcctttggtacaaggaatgcaggacaaaaacatggaggccaagtattgtattcaaaagagatactctgcttataagagaagtcagagaagatgacattggaaattatacctgtgaattaaaatatggaggctttgttgtgagaagaactactgaattaactgttacaggtgactctgctaatctaacctgcagagctttctttgggtacagcggagatgtcagtcctttaatttactggatgaaaggagaaaaatttattgaagatctggatgaaaatcgagtttgggaaagtgacattagaattcttaaggagcatcttggggaacaggaagtttccatctcattaattgtggactctgtggaagaaggtgacttgggaaattactcctgttatgttgaaaatggaaatggacgtcgacacgccagcgttctccttcataaacgagagctaatgtacacagtggaacttgctggaggccttggtgctatactcttgctgcttgtatgtttggtgaccatctacaagtgttacaagatagaaatcatgctcttctacaggaatcattttggagctgaagagctcgatggagacaataaagattatgatgcatacttatcatacaccaaagtggatcctgaccagtggaatcaagagactggggaagaagaacgttttgcccttgaaatcctacctgatatgcttgaaaagcattatggatataagttgtttataccagatagagatttaatcccaactggaacatacattgaagatgtggcaagatgtgtagatcaaagcaagcggctgattattgtcatgaccccaaattacgtagttagaaggggctggagcatctttgagctggaaaccagacttcgaaatatgcttgtgactggagaaattaaagtgattctaattgaatgcagtgaactgagaggaattatgaactaccaggaggtggaggccctgaagcacaccatcaagctcctgacggtcattaaatggcatggaccaaaatgcaacaagttgaactccaagttctggaaacgtttacagtatgaaatgccttttaagaggatagaacccattacacatgagcaggctttagatgtcagtgagcaagggccttttggggagctgcagactgtctcggccatttccatggccgcggccacctccacagctctagccactgcccatccagatctccgttctacctttcacaacacgtaccattcacaaatgcgtcagaaacactactaccgaagctatgagtacgacgtacctcctaccggcaccctgcctcttacctccataggcaatcagcatacctactgtaacatccctatgacactcatcaacgggcagcggccacagacaaaatcgagcagggagcagaatccagatgaggcccacacaaacagtgccatcctgccgctgttgccaagggagaccagtatatccagtgtgatatggtga

SEQ ID NO: 431 - DNA, 1958 bp, Artificial sequence
  A novel predicted alternative spliced variant
atgaaagctccgattccacacttgattctcttatacgctacttttactcagagtttgaaggttgtgaccaaaagaggctccgccgatggatgcactgactggtctatcgatatcaagaaatatcaagttttggtgggagagcctgttcgaatcaaatgtgcactcttttatggttatatcagaacaaattactcccttgcccaaagtgctggactcagtttgatgtggtacaaaagttctggtcctggagactttgaagagccaatagcctttgacggaagtagaatgagcaaagaagaagactccatttggttccggccaacattgctacaggacagtggtctctacgcctgtgtcatcagaaactccacttactgtatgaaagtatccatctcactgacagtgggtgaaaatgacactggactctgctataattccaagatgaagtattttgaaaaagctgaacttagcaaaagcaaggaaatttcatgccgtgacatagaggattttctactgccaaccagagaacctgaaatcctttggtacaaggaatgcaggacaaaaacatggaggccaagtattgtattcaaaagagatactctgcttataagagaagtcagagaagatgacattggaaattatacctgtgaattaaaatatggaggctttgttgtgagaagaactactgaattaactgttacagcccctctgactgataagccacccaagcttttgtatcctatggaaagtaaactgacaattcaggagacccagctggaattcttaaggagcatcttggggaacaggaagtttccatctcattaattgtggactctgtggaagaaggtgacttgggaaattactcctgttatgttgaaaatggaaatggacgtcgacacgccagcgttctccttcataaacgagagctaatgtacacagtggaacttgctggaggccttggtgctatactcttgctgcttgtatgtttggtgaccatctacaagtgttacaagatagaaatcatgctcttctacaggaatcattttggagctgaagagctcgatggagacaataaagattatgatgcatacttatcatacaccaaagtggatcctgaccagtggaatcaagagactggggaagaagaacgttttgcccttgaaatcctacctgatatgcttgaaaagcattatggatataagttgtttataccagatagagatttaatcccaactggaacatacattgaagatgtggcaagatgtgtagatcaaagcaagcggctgattattgtcatgaccccaaattacgtagttagaaggggctggagcatctttgagctggaaaccagacttcgaaatatgcttgtgactggagaaattaaagtgattctaattgaatgcagtgaactgagaggaattatgaactaccaggaggtggaggccctgaagcacaccatcaagctcctgacggtcattaaatggcatggaccaaaatgcaacaagttgaactccaagttctggaaacgtttacagtatgaaatgccttttaagaggatagaacccattacacatgagcaggctttagatgtcagtgagcaagggccttttggggagctgcagactgtctcggccatttccatggccgcggccacctccacagctctagccactgcccatccagatctccgttctacctttcacaacacgtaccattcacaaatgcgtcagaaacactactaccgaagctatgagtacgacgtacctcctaccggcaccctgcctcttacctccataggcaatcagcatacctactgtaacatccctatgacactcatcaacgggcagcggccacagacaaaatcgagcagggagcagaatccagatgaggcccacacaaacagtgccatcctgccgctgttgccaagggagaccagtatatccagtgtgatatggtga

SEQ ID NO: 432 - DNA, 1945 bp, Artificial sequence
  A novel predicted alternative spliced variant
atgaaagctccgattccacacttgattctcttatacgctacttttactcagagtttgaaggttgtgaccaaaagaggctccgccgatggatgcactgactggtctatcgatatcaagaaatatcaagttttggtgggagagcctgttcgaatcaaatgtgcactcttttatggttatatcagaacaaattactcccttgcccaaagtgctggactcagtttgatgtggtacaaaagttctggtcctggagactttgaagagccaatagcctttgacggaagtagaatgagcaaagaagaagactccatttggttccggccaacattgctacaggacagtggtctctacgcctgtgtcatcagaaactccacttactgtatgaaagtatccatctcactgacagtgggtgaaaatgacactggactctgctataattccaagatgaagtattttgaaaaagctgaacttagcaaaagcaaggaaatttcatgccgtgacatagaggattttctactgccaaccagagaacctgaaatcctttggtacaaggaatgcaggacaaaaacatggaggccaagtattgtattcaaaagagatactctgcttataagagaagtcagagaagatgacattggaaattatacctgtgaattaaaatatggaggctttgttgtgagaagaactactgaattaactgttacagcccctctgactgataagccacccaagcttttgtatcctatggaaagtaaactgacaattcaggagacccagctgggtgactctgctaatctaacctgcagagctttctttgggtacagcggagatgtcagtcctttaatttactggatgaaaggagaaaaatttattgaagatctggatgaaaatcgagtttgggaaagtgacattagagctaatgtacacagtggaacttgctggaggccttggtgctatactcttgctgcttgtatgtttggtgaccatctacaagtgttacaagatagaaatcatgctcttctacaggaatcattttggagctgaagagctcgatggagacaataaagattatgatgcatacttatcatacaccaaagtggatcctgaccagtggaatcaagagactggggaagaagaacgttttgcccttgaaatcctacctgatatgcttgaaaagcattatggatataagttgtttataccagatagagatttaatcccaactggaacatacattgaagatgtggcaagatgtgtagatcaaagcaagcggctgattattgtcatgaccccaaattacgtagttagaaggggctggagcatctttgagctggaaaccagacttcgaaatatgcttgtgactggagaaattaaagtgattctaattgaatgcagtgaactgagaggaattatgaactaccaggaggtggaggccctgaagcacaccatcaagctcctgacggtcattaaatggcatggaccaaaatgcaacaagttgaactccaagttctggaaacgtttacagtatgaaatgccttttaagaggatagaacccattacacatgagcaggctttagatgtcagtgagcaagggccttttggggagctgcagactgtctcggccatttccatggccgcggccacctccacagctctagccactgcccatccagatctccgttctacctttcacaacacgtaccattcacaaatgcgtcagaaacactactaccgaagctatgagtacgacgtacctcctaccggcaccctgcctcttacctccataggcaatcagcatacctactgtaacatccctatgacactcatcaacgggcagcggccacagacaaaatcgagcagggagcagaatccagatgaggcccacacaaacagtgccatcctgccgctgttgccaagggagaccagtatatccagtgtgatatggtga

SEQ ID NO: 433 - DNA, 1874 bp, Artificial sequence
  A novel predicted alternative spliced variant
atgaagccaccatttcttttggcccttgtggtctgttctgtagtcagcacaaatctgaagatggtgtcaaagagaaattctgtggatggctgcattgactggtcagtggatctcaagacatacatggctttggcaggtgaaccagtccgagtgaaatgtgcccttttctacagttatattcgtaccaactatagcacggcccagagcactgggctcaggcttatgtggtacaaaaacaaaggtgatttggaagagcccatcatcttttcagaggtcaggatgagcaaagaggaagattcaatatggtttcactcagctgaggcacaagacagtggattctacacttgtgttttaaggaatgcaagccaaaaatgtggagaagcataataatacagaaaggaaatgctcttctgatccaagaagttcaagaagaagatggaggaaattacacatgtgaacttaaatatgaaggaaaacttgtaagacgaacaactgaattgaaagttacagctttactcacagacaagcctcccaagccattgttccccatggagaatcagccaagtgttatagatgtccagctgggtaagcctctgaacatcccctgcaaagcattcttcggattcagtggagagtctgggccaatgatctactggatgaaaggagaaaagtttattgaagaactggcaggtcacattagagaaggtgaaataaggcttctcaaagagcatcttggagaaaaagaagttgaattggcactcatctttgactcagttgtggaagctgacctggcgaattatacctgccatgttgaaaaccgaaatggacggaaacatgccagtgttttgctgcgtaaaaaggatttaatctataaaattgagcttgcagggggcctgggagcaatcttcctcctccttgtactgctggtggtcatttacaaatgctacaacattgaattgatgctcttctacaggcagcactttggagctgatgaaactaatgatgacaacaaggaatatgatgcctatctctcttacacaaaagtggaccaagatactttagactgtgacaatcctgaagaagagcagtttgctcttgaagtactgccagatgtcctggaaaaacactatggatataaactcttcatcccagaaagagacctgattccaagtggaacatacatggaagatctcacaagatatgttgaacaaagcagaagacttattatcgtgctaactccagactatattctcagacggggatggagtattttcgaactggaaagcagactccataacatgctagtcagtggagaaatcaaagtgattttgattgagtgtacagaattaaaagggaaagtgaattgccaggaagtggaatcactaaagcgtagcatcaaacttctgtccctgatcaagtggaagggatccaaaagcagcaaattaaattctaagttttggaagcacttagtatatgaaatgcccatcaagaaaaaagaaatgctacctcggtgccatgttctggactccgcagaacaaggactttttggagaactccagcctataccctctattgccatgaccagtacttcagccactctggtgtcatctcaggctgatctccctgaattccacccttcagattcaatgcaaatcaggcactgttgcagaggttataaacatgagataccagccacgaccttgccagtaccttccttaggcaaccaccatacttattgtaacctgcctctgacgctactcaacggacagctaccccttaataacaccctgaaagatacccaggaatttcacaggaacagttctttgctgcctttatcctccaaagagcttagctttaccagtgatatttggtag

SEQ ID NO: 434 - DNA, 1907 bp, Artificial sequence
  A novel predicted alternative spliced variant
atgaagccaccatttcttttggcccttgtggtctgttctgtagtcagcacaaatctgaagatggtgtcaaagagaaattctgtggatggctgcattgactggtcagtggatctcaagacatacatggctttggcaggtgaaccagtccgagtgaaatgtgcccttttctacagttatattcgtaccaactatagcacggcccagagcactgggctcaggcttatgtggtacaaaaacaaaggtgatttggaagagcccatcatcttttcagaggtcaggatgagcaaagaggaagattcaatatggtttcactcagctgaggcacaagacagtggattctacacttgtgttttaagaaactcaacatattgcatgaaggtgtcaatgtccttgactgttgcagagaatgaatcaggcctgtgctacaacagcaggatccgctatttagaaaaatctgaagtcactaaaagaaaggagatctcctgtccagacatggatgactttaaaaagtccgatcaggagcctgatgttgtgtggtataagctttactcacagacaagcctcccaagccattgttccccatggagaatcagccaagtgttatagatgtccagctgggtaagcctctgaacatcccctgcaaagcattcttcggattcagtggagagtctgggccaatgatctactggatgaaaggagaaaagtttattgaagaactggcaggtcacattagagaaggtgaaataaggcttctcaaagagcatcttggagaaaaagaagttgaattggcactcatctttgactcagttgtggaagctgacctggcgaattatacctgccatgttgaaaaccgaaatggacggaaacatgccagtgttttgctgcgtaaaaaggatttaatctataaaattgagcttgcagggggcctgggagcaatcttcctcctccttgtactgctggtggtcatttacaaatgctacaacattgaattgatgctcttctacaggcagcactttggagctgatgaaactaatgatgacaacaaggaatatgatgcctatctctcttacacaaaagtggaccaagatactttagactgtgacaatcctgaagaagagcagtttgctcttgaagtactgccagatgtcctggaaaaacactatggatataaactcttcatcccagaaagagacctgattccaagtggaacatacatggaagatctcacaagatatgttgaacaaagcagaagacttattatcgtgctaactccagactatattctcagacggggatggagtattttcgaactggaaagcagactccataacatgctagtcagtggagaaatcaaagtgattttgattgagtgtacagaattaaaagggaaagtgaattgccaggaagtggaatcactaaagcgtagcatcaaacttctgtccctgatcaagtggaagggatccaaaagcagcaaattaaattctaagttttggaagcacttagtatatgaaatgcccatcaagaaaaaagaaatgctacctcggtgccatgttctggactccgcagaacaaggactttttggagaactccagcctataccctctattgccatgaccagtacttcagccactctggtgtcatctcaggctgatctccctgaattccacccttcagattcaatgcaaatcaggcactgttgcagaggttataaacatgagataccagccacgaccttgccagtaccttccttaggcaaccaccatacttattgtaacctgcctctgacgctactcaacggacagctaccccttaataacaccctgaaagatacccaggaatttcacaggaacagttctttgctgcctttatcctccaaagagcttagctttaccagtgatatttggtag

SEQ ID NO: 435 - DNA, 1986 bp, Artificial sequence
  A novel predicted alternative spliced variant
atgaagccaccatttcttttggcccttgtggtctgttctgtagtcagcacaaatctgaagatggtgtcaaagagaaattctgtggatggctgcattgactggtcagtggatctcaagacatacatggctttggcaggtgaaccagtccgagtgaaatgtgcccttttctacagttatattcgtaccaactatagcacggcccagagcactgggctcaggcttatgtggtacaaaaacaaaggtgatttggaagagcccatcatcttttcagaggtcaggatgagcaaagaggaagattcaatatggtttcactcagctgaggcacaagacagtggattctacacttgtgttttaagaaactcaacatattgcatgaaggtgtcaatgtccttgactgttgcagagaatgaatcaggcctgtgctacaacagcaggatccgctatttagaaaaatctgaagtcactaaaagaaaggagatctcctgtccagacatggatgactttaaaaagtccgatcaggagcctgatgttgtgtggtataaggaatgcaagccaaaaatgtggagaagcataataatacagaaaggaaatgctcttctgatccaagaagttcaagaagaagatggaggaaattacacatgtgaacttaaatatgaaggaaaacttgtaagacgaacaactgaattgaaagttacaggtaagcctctgaacatcccctgcaaagcattcttcggattcagtggagagtctgggccaatgatctactggatgaaaggagaaaagtttattgaagaactggcaggtcacattagagaaggtgaaataaggcttctcaaagagcatcttggagaaaaagaagttgaattggcactcatctttgactcagttgtggaagctgacctggcgaattatacctgccatgttgaaaaccgaaatggacggaaacatgccagtgttttgctgcgtaaaaaggatttaatctataaaattgagcttgcagggggcctgggagcaatcttcctcctccttgtactgctggtggtcatttacaaatgctacaacattgaattgatgctcttctacaggcagcactttggagctgatgaaactaatgatgacaacaaggaatatgatgcctatctctcttacacaaaagtggaccaagatactttagactgtgacaatcctgaagaagagcagtttgctcttgaagtactgccagatgtcctggaaaaacactatggatataaactcttcatcccagaaagagacctgattccaagtggaacatacatggaagatctcacaagatatgttgaacaaagcagaagacttattatcgtgctaactccagactatattctcagacggggatggagtattttcgaactggaaagcagactccataacatgctagtcagtggagaaatcaaagtgattttgattgagtgtacagaattaaaagggaaagtgaattgccaggaagtggaatcactaaagcgtagcatcaaacttctgtccctgatcaagtggaagggatccaaaagcagcaaattaaattctaagttttggaagcacttagtatatgaaatgcccatcaagaaaaaagaaatgctacctcggtgccatgttctggactccgcagaacaaggactttttggagaactccagcctataccctctattgccatgaccagtacttcagccactctggtgtcatctcaggctgatctccctgaattccacccttcagattcaatgcaaatcaggcactgttgcagaggttataaacatgagataccagccacgaccttgccagtaccttccttaggcaaccaccatacttattgtaacctgcctctgacgctactcaacggacagctaccccttaataacaccctgaaagatacccaggaatttcacaggaacagttctttgctgcctttatcctccaaagagcttagctttaccagtgatatttggtag

SEQ ID NO: 436 - DNA, 1931 bp, Artificial sequence
  A novel predicted alternative spliced variant
atgaagccaccatttcttttggcccttgtggtctgttctgtagtcagcacaaatctgaagatggtgtcaaagagaaattctgtggatggctgcattgactggtcagtggatctcaagacatacatggctttggcaggtgaaccagtccgagtgaaatgtgcccttttctacagttatattcgtaccaactatagcacggcccagagcactgggctcaggcttatgtggtacaaaaacaaaggtgatttggaagagcccatcatcttttcagaggtcaggatgagcaaagaggaagattcaatatggtttcactcagctgaggcacaagacagtggattctacacttgtgttttaagaaactcaacatattgcatgaaggtgtcaatgtccttgactgttgcagagaatgaatcaggcctgtgctacaacagcaggatccgctatttagaaaaatctgaagtcactaaaagaaaggagatctcctgtccagacatggatgactttaaaaagtccgatcaggagcctgatgttgtgtggtataaggaatgcaagccaaaaatgtggagaagcataataatacagaaaggaaatgctcttctgatccaagaagttcaagaagaagatggaggaaattacacatgtgaacttaaatatgaaggaaaacttgtaagacgaacaactgaattgaaagttacagctttactcacagacaagcctcccaagccattgttccccatggagaatcagccaagtgttatagatgtccagctgggcttctcaaagagcatcttggagaaaaagaagttgaattggcactcatctttgactcagttgtggaagctgacctggcgaattatacctgccatgttgaaaaccgaaatggacggaaacatgccagtgttttgctgcgtaaaaaggatttaatctataaaattgagcttgcagggggcctgggagcaatcttcctcctccttgtactgctggtggtcatttacaaatgctacaacattgaattgatgctcttctacaggcagcactttggagctgatgaaactaatgatgacaacaaggaatatgatgcctatctctcttacacaaaagtggaccaagatactttagactgtgacaatcctgaagaagagcagtttgctcttgaagtactgccagatgtcctggaaaaacactatggatataaactcttcatcccagaaagagacctgattccaagtggaacatacatggaagatctcacaagatatgttgaacaaagcagaagacttattatcgtgctaactccagactatattctcagacggggatggagtattttcgaactggaaagcagactccataacatgctagtcagtggagaaatcaaagtgattttgattgagtgtacagaattaaaagggaaagtgaattgccaggaagtggaatcactaaagcgtagcatcaaacttctgtccctgatcaagtggaagggatccaaaagcagcaaattaaattctaagttttggaagcacttagtatatgaaatgcccatcaagaaaaaagaaatgctacctcggtgccatgttctggactccgcagaacaaggactttttggagaactccagcctataccctctattgccatgaccagtacttcagccactctggtgtcatctcaggctgatctccctgaattccacccttcagattcaatgcaaatcaggcactgttgcagaggttataaacatgagataccagccacgaccttgccagtaccttccttaggcaaccaccatacttattgtaacctgcctctgacgctactcaacggacagctaccccttaataacaccctgaaagatacccaggaatttcacaggaacagttctttgctgcctttatcctccaaagagcttagctttaccagtgatatttggtag

SEQ ID NO: 437 - DNA, 1915 bp, Artificial sequence
  A novel predicted alternative spliced variant
atgaagccaccatttcttttggcccttgtggtctgttctgtagtcagcacaaatctgaagatggtgtcaaagagaaattctgtggatggctgcattgactggtcagtggatctcaagacatacatggctttggcaggtgaaccagtccgagtgaaatgtgcccttttctacagttatattcgtaccaactatagcacggcccagagcactgggctcaggcttatgtggtacaaaaacaaaggtgatttggaagagcccatcatcttttcagaggtcaggatgagcaaagaggaagattcaatatggtttcactcagctgaggcacaagacagtggattctacacttgtgttttaagaaactcaacatattgcatgaaggtgtcaatgtccttgactgttgcagagaatgaatcaggcctgtgctacaacagcaggatccgctatttagaaaaatctgaagtcactaaaagaaaggagatctcctgtccagacatggatgactttaaaaagtccgatcaggagcctgatgttgtgtggtataaggaatgcaagccaaaaatgtggagaagcataataatacagaaaggaaatgctcttctgatccaagaagttcaagaagaagatggaggaaattacacatgtgaacttaaatatgaaggaaaacttgtaagacgaacaactgaattgaaagttacagctttactcacagacaagcctcccaagccattgttccccatggagaatcagccaagtgttatagatgtccagctgggtaagcctctgaacatcccctgcaaagcattcttcggattcagtggagagtctgggccaatgatctactggatgaaaggagaaaagtttattgaagaactggcaggtcacattagagaaggtgaaataagatttaatctataaaattgagcttgcagggggcctgggagcaatcttcctcctccttgtactgctggtggtcatttacaaatgctacaacattgaattgatgctcttctacaggcagcactttggagctgatgaaactaatgatgacaacaaggaatatgatgcctatctctcttacacaaaagtggaccaagatactttagactgtgacaatcctgaagaagagcagtttgctcttgaagtactgccagatgtcctggaaaaacactatggatataaactcttcatcccagaaagagacctgattccaagtggaacatacatggaagatctcacaagatatgttgaacaaagcagaagacttattatcgtgctaactccagactatattctcagacggggatggagtattttcgaactggaaagcagactccataacatgctagtcagtggagaaatcaaagtgattttgattgagtgtacagaattaaaagggaaagtgaattgccaggaagtggaatcactaaagcgtagcatcaaacttctgtccctgatcaagtggaagggatccaaaagcagcaaattaaattctaagttttggaagcacttagtatatgaaatgcccatcaagaaaaaagaaatgctacctcggtgccatgttctggactccgcagaacaaggactttttggagaactccagcctataccctctattgccatgaccagtacttcagccactctggtgtcatctcaggctgatctccctgaattccacccttcagattcaatgcaaatcaggcactgttgcagaggttataaacatgagataccagccacgaccttgccagtaccttccttaggcaaccaccatacttattgtaacctgcctctgacgctactcaacggacagctaccccttaataacaccctgaaagatacccaggaatttcacaggaacagttctttgctgcctttatcctccaaagagcttagctttaccagtgatatttggtag

SEQ ID NO: 438 - DNA, 3437 bp, Artificial sequence
  A novel predicted alternative spliced variant
atggggctggcctggggactaggcgtcctgttcctgatgcatgtgtgtggcaccaaccgcattccagagtctggcggagacaacagcgtgtttgacatctttgaactcaccggggccgcccgcaaggggtctgggcgccgactggtgaagggccccgacccttccagcccagctttccgcatcgaggatgccaacctgatcccccctgtgcctgatgacaagttccaagacctggtggatgctgtgcgggcagaaaagggtttcctccttctggcatccctgaggcagatgaagaagacccggggcacgctgctggccctggagcggaaagaccactctggccaggtcttcagcgtggtgtccaatggcaaggcgggcaccctggacctcagcctgaccgtccaaggaaagcagcacgtggtgtctgtggaagaagctctcctggcaaccggccagtggaagagcatcaccctgtttgtgcaggaagacagggcccagctgtacatcgactgtgaaaagatggagaatgctgagttggacgtccccatccaaagcgtcttcaccagagacctggccagcatcgccagactccgcatcgcaaaggggggcgtcaatgacaatttccagctaccagtgtcctcctcacccttgacaacaacgtggtgaatggttccagccctgccatccgcactaactacattggccacaagacaaaggacttgcaagccatctgcggcatctcctgtgatgagctgtccagcatggtcctggaactcaggggcctgcgcaccattgtgaccacgctgcaggacagcatccgcaaagtgactgaagagaacaaagagttggccaatgagctgaggcggcctcccctatgctatcacaacggagttcagtacagaaataacgaggaatggactgttgatagctgcactgagtgtcactgtcagaactcagttaccatctgcaaaaaggtgtcctgccccatcatgccctgctccaatgccacagttcctgatggagaatgctgtcctcgctgttggcccagcgactctgcggacgatggctggtctccatggtccgagtggacctcctgttctacgagctgtggcaatggaattcagcagcgcggccgctcctgcgatagcctcaacaaccgatgtgagggctcctcggtccagacacggacctgccacattcaggagtgtgacaaaagatttaaacaggatggtggctggagccactggtccccgtggtcatcttgttctgtgacatgtggtgatggtgtgatcacaaggatccggctctgcaactctcccagcccccagatgaatgggaaaccctgtgaaggcgaagcgcgggagaccaaagcctgcaagaaagacgcctgccccatcaatggaggctggggtccttggtcaccatgggacatctgttctgtcacctgtggaggaggggtacagaaacgtagtcgtctctgcaacaaccccgcaccccagtttggaggcaaggactgcgttggtgatgtaacagaaaaccagatctgcaacaagcaggactgtccaattgatggatgcctgtccaatccctgctttgccggcgtgaagtgtactagctaccctgatggcagctggaaatgtggtgcttgtccccctggttacagtggaaatggcatccagtgcacagatgttgatgagtgcaaagaagtgcctgatgcctgcttcaaccacaatggagagcaccggtgtgagaacacggaccccggctacaactgcctgccctgccccccacgcttcaccggctcacagcccttcggccagggtgtcgaacatgccacggccaacaaacaggtgtgcaagccccgtaacccctgcacggatgggacccacgactgcaacaagaacgccaagtgcaactacctgggccactatagcgaccccatgtaccgctgcgagtgcaagcctggctacgctggcaatggcatcatctgcggggaggacacagacctggatggctggcccaatgagaacctggtgtgcgtggccaatgcgacttaccactgcaaaaaggataattgccccaaccttcccaactcagggcaggaagactatgacaaggatggaattggtgatgcctgtgatgatgacgatgacaatgataaaattccagatgacagggacaactgtccattccattacaacccagctcagtatgactatgacagagatgatgtgggagaccgctgtgacaactgtccctacaaccacaacccagatcaggcagacacagacaacaatggggaaggagacgcctgtgctgcagacattgatggagacggtatcctcaatgaacgggacaactgccagtacgtctacaatgtggaccagagagacactgatatggatggggttggagatcagtgtgacaattgccccttggaacacaatccggatcagctggactctgactcagaccgcattggagatacctgtgacaacaatcaggatattgatgaagatggccaccagaacaatctggacaactgtccctatgtgcccaatgccaaccaggctgaccatgacaaagatggcaagggagatgcctgtgaccacgatgatgacaacgatggcattcctgatgacaaggacaactgcagactcgtgcccaatcccgaccagaaggactctgacggcgatggtcgaggtgatgcctgcaaagatgattttgaccatgacagtgtgccagacatcgatgacatctgtcctgagaatgttgacatcagtgagaccgatttccgccgattccagatgattcctctggaccccaaagggacatcccaaaatgaccctaactgggttgtacgccatcagggtaaagaactcgtccagactgtcaactgtgatcctggactcgctgtaggttatgatgagtttaatgctgtggacttcagtggcaccttcttcatcaacaccgaaagggacgatgactatgctggatttgtctttggctaccagtccagcagccgcttttatgttgtgatgtggaagcaagtcacccagtcctactgggacaccaaccccacgagggctcagggatactcgggcctttctgtgaaagttgtaaactccaccacagggcctggcgagcacctgcggaacgccctgtggcacacaggaaacacccctggccaggtgcgcaccctgtggcatgaccctcgtcacataggctggaaagatttcaccgcctacagatggcgtctcagccacaggccaaagacgggtttcattagagtggtgatgtatgaagggaagaaaatcatggctgactcaggacccatctatgataaaacctatgctggtggtagactagggttgtttgtcttctctcaagaaatggtgttcttctctgacctgaaatacgaatgtagagatccctaa

SEQ ID NO: 439 - DNA, 3419 bp, Artificial sequence
  A novel predicted alternative spliced variant
atggggctggcctggggactaggcgtcctgttcctgatgcatgtgtgtggcaccaaccgcattccagagtctggcggagacaacagcgtgtttgacatctttgaactcaccggggccgcccgcaaggggtctgggcgccgactggtgaagggccccgacccttccagcccagctttccgcatcgaggatgccaacctgatcccccctgtgcctgatgacaagttccaagacctggtggatgctgtgcgggcagaaaagggtttcctccttctggcatccctgaggcagatgaagaagacccggggcacgctgctggccctggagcggaaagaccactctggccaggtcttcagcgtggtgtccaatggcaaggcgggcaccctggacctcagcctgaccgtccaaggaaagcagcacgtggtgtctgtggaagaagctctcctggcaaccggccagtggaagagcatcaccctgtttgtgcaggaagacagggcccagctgtacatcgactgtgaaaagatggagaatgctgagttggacgtccccatccaaagcgtcttcaccagagacctggccagcatcgccagactccgcatcgcaaaggggggcgtcaatgacaatttccagggggtgctgcagaatgtgaggtttgtctttggaaccacaccagaagacatcctcaggaacaaaggctgctccagctctaccagtgtcctcctcacccttgacaacaacgtggtgaatggttccagccctgccatccgcactaactacattggccacaagacaaaggacttgcaagccatctgcggcatctcctgtgatgagctgtccagcatggtcctggaactcaggggcctgcgcaccattgtgaccacgctgcaggacagcatccgcaaagtgactgaagagaacaaagagttggccaatgagctgaggcggcctcccctatgctatcacaacggagttcagtacagaaataacgaggaatggactgttgatagctgcactgagtgtcactgtcagccagcgactctgcggacgatggctggtctccatggtccgagtggacctcctgttctacgagctgtggcaatggaattcagcagcgcggccgctcctgcgatagcctcaacaaccgatgtgagggctcctcggtccagacacggacctgccacattcaggagtgtgacaaaagatttaaacaggatggtggctggagccactggtccccgtggtcatcttgttctgtgacatgtggtgatggtgtgatcacaaggatccggctctgcaactctcccagcccccagatgaatgggaaaccctgtgaaggcgaagcgcgggagaccaaagcctgcaagaaagacgcctgccccatcaatggaggctggggtccttggtcaccatgggacatctgttctgtcacctgtggaggaggggtacagaaacgtagtcgtctctgcaacaaccccgcaccccagtttggaggcaaggactgcgttggtgatgtaacagaaaaccagatctgcaacaagcaggactgtccaattgatggatgcctgtccaatccctgctttgccggcgtgaagtgtactagctaccctgatggcagctggaaatgtggtgcttgtccccctggttacagtggaaatggcatccagtgcacagatgttgatgagtgcaaagaagtgcctgatgcctgcttcaaccacaatggagagcaccggtgtgagaacacggaccccggctacaactgcctgccctgccccccacgcttcaccggctcacagcccttcggccagggtgtcgaacatgccacggccaacaaacaggtgtgcaagccccgtaacccctgcacggatgggacccacgactgcaacaagaacgccaagtgcaactacctgggccactatagcgaccccatgtaccgctgcgagtgcaagcctggctacgctggcaatggcatcatctgcggggaggacacagacctggatggctggcccaatgagaacctggtgtgcgtggccaatgcgacttaccactgcaaaaaggataattgccccaaccttcccaactcagggcaggaagactatgacaaggatggaattggtgatgcctgtgatgatgacgatgacaatgataaaattccagatgacagggacaactgtccattccattacaacccagctcagtatgactatgacagagatgatgtgggagaccgctgtgacaactgtccctacaaccacaacccagatcaggcagacacagacaacaatggggaaggagacgcctgtgctgcagacattgatggagacggtatcctcaatgaacgggacaactgccagtacgtctacaatgtggaccagagagacactgatatggatggggttggagatcagtgtgacaattgccccttggaacacaatccggatcagctggactctgactcagaccgcattggagatacctgtgacaacaatcaggatattgatgaagatggccaccagaacaatctggacaactgtccctatgtgcccaatgccaaccaggctgaccatgacaaagatggcaagggagatgcctgtgaccacgatgatgacaacgatggcattcctgatgacaaggacaactgcagactcgtgcccaatcccgaccagaaggactctgacggcgatggtcgaggtgatgcctgcaaagatgattttgaccatgacagtgtgccagacatcgatgacatctgtcctgagaatgttgacatcagtgagaccgatttccgccgattccagatgattcctctggaccccaaagggacatcccaaaatgaccctaactgggttgtacgccatcagggtaaagaactcgtccagactgtcaactgtgatcctggactcgctgtaggttatgatgagtttaatgctgtggacttcagtggcaccttcttcatcaacaccgaaagggacgatgactatgctggatttgtctttggctaccagtccagcagccgcttttatgttgtgatgtggaagcaagtcacccagtcctactgggacaccaaccccacgagggctcagggatactcgggcctttctgtgaaagttgtaaactccaccacagggcctggcgagcacctgcggaacgccctgtggcacacaggaaacacccctggccaggtgcgcaccctgtggcatgaccctcgtcacataggctggaaagatttcaccgcctacagatggcgtctcagccacaggccaaagacgggtttcattagagtggtgatgtatgaagggaagaaaatcatggctgactcaggacccatctatgataaaacctatgctggtggtagactagggttgtttgtcttctctcaagaaatggtgttcttctctgacctgaaatacgaatgtagagatccctaa

SEQ ID NO: 440 - DNA, 3336 bp, Artificial sequence
  A novel predicted alternative spliced variant
atggggctggcctggggactaggcgtcctgttcctgatgcatgtgtgtggcaccaaccgcattccagagtctggcggagacaacagcgtgtttgacatctttgaactcaccggggccgcccgcaaggggtctgggcgccgactggtgaagggccccgacccttccagcccagctttccgcatcgaggatgccaacctgatcccccctgtgcctgatgacaagttccaagacctggtggatgctgtgcgggcagaaaagggtttcctccttctggcatccctgaggcagatgaagaagacccggggcacgctgctggccctggagcggaaagaccactctggccaggtcttcagcgtggtgtccaatggcaaggcgggcaccctggacctcagcctgaccgtccaaggaaagcagcacgtggtgtctgtggaagaagctctcctggcaaccggccagtggaagagcatcaccctgtttgtgcaggaagacagggcccagctgtacatcgactgtgaaaagatggagaatgctgagttggacgtccccatccaaagcgtcttcaccagagacctggccagcatcgccagactccgcatcgcaaaggggggcgtcaatgacaatttccagggggtgctgcagaatgtgaggtttgtctttggaaccacaccagaagacatcctcaggaacaaaggctgctccagctctaccagtgtcctcctcacccttgacaacaacgtggtgaatggttccagccctgccatccgcactaactacattggccacaagacaaaggacttgcaagccatctgcggcatctcctgtgatgagctgtccagcatggtcctggaactcaggggcctgcgcaccattgtgaccacgctgcaggacagcatccgcaaagtgactgaagagaacaaagagttggccaatgagctgaggcggcctcccctatgctatcacaacggagttcagtacagaaataacgaggaatggactgttgatagctgcactgagtgtcactgtcagaactcagttaccatctgcaaaaaggtgtcctgccccatcatgccctgctccaatgccacagttcctgatggagaatgctgtcctcgctgttggcccagcgactctgcggacgatggctggtctccatggtccgagtggacctcctgttctacgagctgtggcaatggaattcagcagcgcggccgctcctgcgatagcctcaacaaccgatgtgagggctcctcggtccagacacggacctgccacattcaggagtgtgacaaaagattcaatggaggctggggtccttggtcaccatgggacatctgttctgtcacctgtggaggaggggtacagaaacgtagtcgtctctgcaacaaccccgcaccccagtttggaggcaaggactgcgttggtgatgtaacagaaaaccagatctgcaacaagcaggactgtccaattgatggatgcctgtccaatccctgctttgccggcgtgaagtgtactagctaccctgatggcagctggaaatgtggtgcttgtccccctggttacagtggaaatggcatccagtgcacagatgttgatgagtgcaaagaagtgcctgatgcctgcttcaaccacaatggagagcaccggtgtgagaacacggaccccggctacaactgcctgccctgccccccacgcttcaccggctcacagcccttcggccagggtgtcgaacatgccacggccaacaaacaggtgtgcaagccccgtaacccctgcacggatgggacccacgactgcaacaagaacgccaagtgcaactacctgggccactatagcgaccccatgtaccgctgcgagtgcaagcctggctacgctggcaatggcatcatctgcggggaggacacagacctggatggctggcccaatgagaacctggtgtgcgtggccaatgcgacttaccactgcaaaaaggataattgccccaaccttcccaactcagggcaggaagactatgacaaggatggaattggtgatgcctgtgatgatgacgatgacaatgataaaattccagatgacagggacaactgtccattccattacaacccagctcagtatgactatgacagagatgatgtgggagaccgctgtgacaactgtccctacaaccacaacccagatcaggcagacacagacaacaatggggaaggagacgcctgtgctgcagacattgatggagacggtatcctcaatgaacgggacaactgccagtacgtctacaatgtggaccagagagacactgatatggatggggttggagatcagtgtgacaattgccccttggaacacaatccggatcagctggactctgactcagaccgcattggagatacctgtgacaacaatcaggatattgatgaagatggccaccagaacaatctggacaactgtccctatgtgcccaatgccaaccaggctgaccatgacaaagatggcaagggagatgcctgtgaccacgatgatgacaacgatggcattcctgatgacaaggacaactgcagactcgtgcccaatcccgaccagaaggactctgacggcgatggtcgaggtgatgcctgcaaagatgattttgaccatgacagtgtgccagacatcgatgacatctgtcctgagaatgttgacatcagtgagaccgatttccgccgattccagatgattcctctggaccccaaagggacatcccaaaatgaccctaactgggttgtacgccatcagggtaaagaactcgtccagactgtcaactgtgatcctggactcgctgtaggttatgatgagtttaatgctgtggacttcagtggcaccttcttcatcaacaccgaaagggacgatgactatgctggatttgtctttggctaccagtccagcagccgcttttatgttgtgatgtggaagcaagtcacccagtcctactgggacaccaaccccacgagggctcagggatactcgggcctttctgtgaaagttgtaaactccaccacagggcctggcgagcacctgcggaacgccctgtggcacacaggaaacacccctggccaggtgcgcaccctgtggcatgaccctcgtcacataggctggaaagatttcaccgcctacagatggcgtctcagccacaggccaaagacgggtttcattagagtggtgatgtatgaagggaagaaaatcatggctgactcaggacccatctatgataaaacctatgctggtggtagactagggttgtttgtcttctctcaagaaatggtgttcttctctgacctgaaatacgaatgtagagatccctaa

SEQ ID NO: 441 - DNA, 3360 bp, Artificial sequence
  A novel predicted alternative spliced variant
atggggctggcctggggactaggcgtcctgttcctgatgcatgtgtgtggcaccaaccgcattccagagtctggcggagacaacagcgtgtttgacatctttgaactcaccggggccgcccgcaaggggtctgggcgccgactggtgaagggccccgacccttccagcccagctttccgcatcgaggatgccaacctgatcccccctgtgcctgatgacaagttccaagacctggtggatgctgtgcgggcagaaaagggtttcctccttctggcatccctgaggcagatgaagaagacccggggcacgctgctggccctggagcggaaagaccactctggccaggtcttcagcgtggtgtccaatggcaaggcgggcaccctggacctcagcctgaccgtccaaggaaagcagcacgtggtgtctgtggaagaagctctcctggcaaccggccagtggaagagcatcaccctgtttgtgcaggaagacagggcccagctgtacatcgactgtgaaaagatggagaatgctgagttggacgtccccatccaaagcgtcttcaccagagacctggccagcatcgccagactccgcatcgcaaaggggggcgtcaatgacaatttccagggggtgctgcagaatgtgaggtttgtctttggaaccacaccagaagacatcctcaggaacaaaggctgctccagctctaccagtgtcctcctcacccttgacaacaacgtggtgaatggttccagccctgccatccgcactaactacattggccacaagacaaaggacttgcaagccatctgcggcatctcctgtgatgagctgtccagcatggtcctggaactcaggggcctgcgcaccattgtgaccacgctgcaggacagcatccgcaaagtgactgaagagaacaaagagttggccaatgagctgaggcggcctcccctatgctatcacaacggagttcagtacagaaataacgaggaatggactgttgatagctgcactgagtgtcactgtcagaactcagttaccatctgcaaaaaggtgtcctgccccatcatgccctgctccaatgccacagttcctgatggagaatgctgtcctcgctgttggcccagcgactctgcggacgatggctggtctccatggtccgagtggacctcctgttctacgagctgtggcaatggaattcagcagcgcggccgctcctgcgatagcctcaacaaccgatgtgagggctcctcggtccagacacggacctgccacattcaggagtgtgacaaaagatttaaacaggatggtggctggagccactggtccccgtggtcatcttgttctgtgacatgtggtgatggtgtgatcacaaggatccggctctgcaactctcccagcccccagatgaatgggaaaccctgtgaaggcgaagcgcgggagaccaaagcctgcaagaaagacgcctgccccatcaatggaggctggggtccttggtcaccatgggacatctgttctgtcacctgtggaggaggggtacagaaacgtagtcgtctctgcaacaaccccgcaccccagtttggaggcaaggactgcgttggtgatgtaacagaaaaccagatctgcaacaagcaggactgtccaattgatggatgcctgtccaatccctgctttgccggcgtgaagtgtactagctaccctgatggcagctggaaatgtggtgcttgtccccctggttacagtggaaatggcatccagtgcacagatgttgatgaggtgtgcaagccccgtaacccctgcacggatgggacccacgactgcaacaagaacgccaagtgcaactacctgggccactatagcgaccccatgtaccgctgcgagtgcaagcctggctacgctggcaatggcatcatctgcggggaggacacagacctggatggctggcccaatgagaacctggtgtgcgtggccaatgcgacttaccactgcaaaaaggataattgccccaaccttcccaactcagggcaggaagactatgacaaggatggaattggtgatgcctgtgatgatgacgatgacaatgataaaattccagatgacagggacaactgtccattccattacaacccagctcagtatgactatgacagagatgatgtgggagaccgctgtgacaactgtccctacaaccacaacccagatcaggcagacacagacaacaatggggaaggagacgcctgtgctgcagacattgatggagacggtatcctcaatgaacgggacaactgccagtacgtctacaatgtggaccagagagacactgatatggatggggttggagatcagtgtgacaattgccccttggaacacaatccggatcagctggactctgactcagaccgcattggagatacctgtgacaacaatcaggatattgatgaagatggccaccagaacaatctggacaactgtccctatgtgcccaatgccaaccaggctgaccatgacaaagatggcaagggagatgcctgtgaccacgatgatgacaacgatggcattcctgatgacaaggacaactgcagactcgtgcccaatcccgaccagaaggactctgacggcgatggtcgaggtgatgcctgcaaagatgattttgaccatgacagtgtgccagacatcgatgacatctgtcctgagaatgttgacatcagtgagaccgatttccgccgattccagatgattcctctggaccccaaagggacatcccaaaatgaccctaactgggttgtacgccatcagggtaaagaactcgtccagactgtcaactgtgatcctggactcgctgtaggttatgatgagtttaatgctgtggacttcagtggcaccttcttcatcaacaccgaaagggacgatgactatgctggatttgtctttggctaccagtccagcagccgcttttatgttgtgatgtggaagcaagtcacccagtcctactgggacaccaaccccacgagggctcagggatactcgggcctttctgtgaaagttgtaaactccaccacagggcctggcgagcacctgcggaacgccctgtggcacacaggaaacacccctggccaggtgcgcaccctgtggcatgaccctcgtcacataggctggaaagatttcaccgcctacagatggcgtctcagccacaggccaaagacgggtttcattagagtggtgatgtatgaagggaagaaaatcatggctgactcaggacccatctatgataaaacctatgctggtggtagactagggttgtttgtcttctctcaagaaatggtgttcttctctgacctgaaatacgaatgtagagatccctaa

SEQ ID NO: 442 - DNA, 2833 bp, Artificial sequence
  A novel predicted alternative spliced variant
atgctggccccgcgcggagccgccgtcctcctgctgcacctggtcctgcagcggtggctagcggcaggcgcccaggccaccccccaggtctttgaccttctcccatcttccagtcagaggctaaacccaggcgctctgctgccagtcctgacagaccccgccctgaatgatctctatgtgatttccaccttcaagctgcagactaaaagttcagccaccatcttcggtctttactcttcaactgacaacagtaaatattttgaatttactgtgatgggacgcttaagcaaagccatcctccgttacctgaagaacgatgggaaggtgcatttggtggttttcaacaacctgcagctggcagacggaaggcggcacaggatcctcctgaggctgagcaatttgcagcgaggggccggctccctagagctctacctggactgcatccaggtggattccgttcacaatctccccagggcctttgctggcccctcccagaaacctgagaccattgaattgaggactttccagaggaagccacaggacttcttggaagagctgaagctggtggtgagaggctcactgttccaggtggccagcctgcaagactgcttcctgcagcagagtgagccactggctgccacaggcacaggggactttaaccggcagttcttgggtcaaatgacacaattaaaccaactcctgggagaggtgaaggaccttctgagacagcaggttaaggaaacatcatttttgcgaaacaccatagctgaatgccaggcttgcggtcctctcaagtttcagtctccgaccccaagcacggtggtcgccccggctccccctgcaccgccaacacgcccacctcgtcggtgtgactccaacccatgtttccgaggtgtccaatgtaccgacagtagagatggcttccagtgtgggccctgccccgagggctacacaggaaacgggatcacctgtattgatgttgatgagtgcaaataccatccctgctacccgggcgtgcactgcataaatttgtctcctggcttcagatgtgacgcctgcccagtgggcttcacagggcccatggtgcagggtgttgggatcagttttgccaagtcaaacaagcaggtctgcactgacattgatgagtgtcgaaatggagcgtgcgttcccaactcgatctgcgttaatactttgggatcttaccgctgtgggccttgtaagccggggtatactggtgatcagataaggggatgcaaagtggaaagaaactgcagaaacccagagctgaacccttgcagtgtgaatgcccagtgcattgaagagaggcagggggatgtgacatgtgtgtgtggagtcggttgggctggagatggctatatctgtggaaaggatgtggacatcgacagttaccccgacgaagaactgccatgctctgccaggaactgtaaaaaggacaactgcaaatatgtgccaaattctggccaagaagatgcagacagagatggcattggcgacgcttgtgacgaggatgctgacggagatgggatcctgaatgagcaggataactgtgtcctgattcataatgtggaccaaaggaacagcgataaagatatctttggggatgcctgtgataactgcctgagtgtcttaaataacgaccagaaagacaccgatggggatggaagaggagatgcctgtgatgatgacatggatggagatggaataaaaaacattctggacaactgcccaaaatttcccaatcgtgaccaacgggacaaggatggtgatggtgtgggggatgcctgtgacagttgtcctgatgtcagcaaccctaaccagtgatggagatgggcaccaggacagcacagacaactgccccaccgtcattaacagtgcccagctggacaccgataaggatggaattggtgacgagtgtgatgatgatgatgacaatgatggtatcccagacctggtgccccctggaccagacaactgccggctggtccccaacccagcccaggaggatagcaacagcgacggagtgggagacatctgtgagtctgactttgaccaggaccaggtcatcgatcggatcgacgtctgcccagagaacgcagaggtcaccctgaccgacttcagggcttaccagaccgtgggcctggatcctgaaggggatgcccagatcgatcccaactgggtggtcctgaaccagggcatggagattgtacagaccatgaacagtgatcctggcctggcagtggggtacacagcttttaatggagttgacttcgaagggaccttccatgtgaatacccagacagatgatgactatgcaggctttatctttggctaccaagatagctccagcttctacgtggtcatgtggaagcagacggagcagacatattggcaagccaccccattccgagcagttgcagaacctggcattcagctcaaggctgtgaagtctaagacaggtccaggggagcatctccggaactccctgtggcacacgggggacaccagtgaccaggtcaggctgctgtggaaggactccaggaatgtgggctggaaggacaaggtgtcctaccgctggttcctacagcacaggccccaggtgggctacatcagggtacgattttatgaaggctctgagttggtggctgactctggcgtcaccatagacaccacaatgcgtggaggccgacttggcgttttctgcttctctcaagaaaacatcatctggtccaacctcaagtatcgctgcaatgacaccatccctgaggacttccaagagtttcaaacccagaatttcgaccgcttcgataattaa

SEQ ID NO: 443 - DNA, 1471 bp, Artificial sequence
  A novel predicted alternative spliced variant
atgagggtcctgggtgggcgctgcggggcgccgctggcgtgtctcctcctagtgcttcccgtctcagaggcaaaccttctgtcaaagcaacaggcttcacaagtcctggttaggaagcgtcgtgcaaattctttacttgaagaaaccaaacagggtaatcttgaaagagaatgcatcgaagaactgtgcaataaagaagaagccagggaggtctttgaaaatgacccggaaacgtttgtcttcgctcttttcaaactgggttattcactgctgcacgtcagtcaactaatgcttatcctgacctaagaagctgtgtcaatgccattccagaccagtgtagtcctctgccatgcaatgaagatggatatatgagctgcaaagatggaaaagcttcttttacttgcacttgtaaaccaggttggcaaggagaaaagtgtgaatttgacataaatgaatgcaaagatccctcaaatataaatggaggttgcagtcaaatttgtgataatacacctggaagttaccactgttcctgtaaaaatggttttgttatgctttcaaataagaaagattgtaaagatgtggatgaatgctctttgaagccaagcatttgtggcacagctgtgtgcaagaacatcccaggagattttgaatgtgaatgccccgaaggctacagatataatctcaaatcaaagtcttgtgaagatatagatgaatgctctgagaacatgtgtgctcagctttgtgtcaattaccctggaggttacacttgctattgtgatgggaagaaaggattcaaacttgcccaagatcagaagagttgtgaggttgtttcagtgtgccttcccttgaaccttgacacaaagtatgaattactttacttggcggagcagtttgcaggggttgttttatatttaaaatttcgtttgccagaaatcagcagattttcagcagaatttgatttccggacatatgattcagaaggcgtgatactgtacgcagaatctatcgatcactcagcgtggctcctgattgcacttcgtggtggaaagattgaagttcagcttaagaatgaacatacatccaaaatcacaactggaggtgatgttattaataatggtctatggaatatggtgtctgtggaagaattagaacatagtattagcattaaaatagctaaagaagctgtgatggatataaataaacctggacccctttttaagccggaaaatggattgctggaaaccaaagtatactttgcaggattccctcggaaagtggaaagtgaactcattaaaccgattaaccctcgtctagatggatgtatacgaagctggaatttgatgaagcaaggagcttctggaataaaggaaattattcaagaaaaacaaaataagcattgcctggttactgtggagaagggctcctactatcctggttctggaattgctcaatttcacatagattataataa

SEQ ID NO: 444 - DNA, 8319 bp, Artificial sequence
  A novel predicted alternative spliced variant
atgattcctgccagatttgccggggtgctgcttgctctggccctcattttgccagggaccctttgtgcagaaggaactcgcggcaggtcatccacggcccgatgcagccttttcggaagtgacttcgtcaacacctttgatgggagcatgtacagctttgcgggatactgcagttacctcctggcagggggctgccagaaacgctccttctcgattattggggacttccagaatggcaagagagtgagcctctccgtgtatcttggggaattttttgacatccatttgtttgtcaatggtaccgtgacacagggggaccaaagagtctccatgccctatgcctccaaagggctgtatctagaaactgaggctgggtactacaagctgtccggtgaggcctatggctttgtggccaggatcgatggcagcggcaactttcaagtcctgctgtcagacagatacttcaacaagacctgcgggctgtgtggcaactttaacatctttgctgaagatgactttatgacccaagaagggaccttgacctcggacccttatgactttgccaactcatgggctctgagcagtggagaacagtggtgtgaacgggcatctcctcccagcagctcatgcaacatctcctctggggaaatgcagaagggcctgtgggagcagtgccagcttctgaagagcacctcggtgtttgcccgctgccaccctctggtggaccccgagccttttgtggccctgtgtgagaagactttgtgtgagtgtgctggggggctggagtgcgcctgccctgccctcctggagtacgcccggacctgtgcccaggagggaatggtgctgtacggctggaccgaccacagcgcgtgcaagggacagctcctggatgaaggcctctgcgtggagagcaccgagtgtccctgcgtgcattccggaaagcgctaccctcccggcacctccctctctcgagactgcaacacctgcatttgccgaaacagccagtggatctgcagcaatgaagaatgtccaggggagtgccttgtcactggtcaatcccacttcaagagctttgacaacagatacttcaccttcagtgggatctgccagtacctgctggcccgggattgccaggaccactccttctccattgtcattgagactgtccagtgtgctgatgaccgcgacgctgtgtgcacccgctccgtcaccgtccggctgcctggcctgcacaacagccttgtgaaactgaagcatggggcaggagttgccatggatggccaggacatccagctccccctcctgaaaggtgacctccgcatccagcatacagtgacggcctccgtgcgcctcagctacggggaggacctgcagatggactgggatggccgcgggaggctgctggtgaagctgtcccccgtctacgccgggaagacctgcggcctgtgtgggaattacaatggcaaccagggcgacgacttccttaccccctctgggctggcagagccccgggtggaggacttcgggaacgcctggaagctgcacggggactgccaggacctgcagaagcagcacagcgatccctgcgccctcaacccgcgcatgaccaggttctccgaggaggcgtgcgcggtcctgacgtcccccacattcgaggcctgccatcgtgccgtcagcccgctgccctacctgcggaactgccgctacgacgtgtgctcctgctcggacggccgcgagtgcctgtgcggcgccctggccagctatgccgcggcctgcgcggggagaggcgtgcgcgtcgcgtggcgcgagccaggccgctgtgagctgaactgcccgaaaggccaggtgtacctgcagtgcgggaccccctgcaacctgacctgccgctctctctcttacccggatgaggaatgcaatgaggcctgcctggagggctgcttctgccccccagggctctacatggatgagaggggggactgcgtgcccaaggcccagtgcccctgttactatgacggtgagatcttccagccagaagacatcttctcagaccatcacaccatgtgctactgtgaggatggcttcatgcactgtaccatgagtggagtccccggaagcttgctgcctgacgctgtcctcagcagtcccctgtctcatcgcagcaaaaggagcctatcctgtcggccccccatggtcaagctggtgtgtcccgctgacaacctgcgggctgaagggctcgagtgtaccaaaacgtgccagaactatgacctggagtgcatgagcatgggctgtgtctctggctgcctctgccccccgggcatggtccggcatgagaacagatgtgtggccctggaaaggtgtccctgcttccatcagggcaaggagtatgcccctggagaaacagtgaagattggctgcaacacttgtgtctgtcgggaccggaagtggaactgcacagaccatgtgtgtgatgccacgtgctccacgatcggcatggcccactacctcaccttcgacgggctcaaatacctgttccccggggagtgccagtacgttctggtgcaggattactgcggcagtaaccctgggacctttcggatcctagtggggaataagggatgcagccacccctcagtgaaatgcaagaaacgggtcaccatcctggtggagggaggagagattgagctgtttgacggggaggtgaatgtgaagaggcccatgaaggatgagactcactttgaggtggtggagtctggccggtacatcattctgctgctgggcaaagccctctccgtggtctgggaccgccacctgagcatctccgtggtcctgaagcagacataccaggagaaagtgtgtggcctgtgtgggaattttgatggcatccagaacaatgacctcaccagcagcaacctccaagtggaggaagaccctgtggactttgggaactcctggaaagtgagctcgcagtgtgctgacaccagaaaagtgcctctggactcatcccctgccacctgccataacaacatcatgaagcagacgatggtggattcctcctgtagaatccttaccagtgacgtcttccaggactgcaacaagctggtggaccccgagccatatctggatgtctgcatttacgacacctgctcctgtgagtccattggggactgcgcctgcttctgcgacaccattgctgcctatgcccacgtgtgtgcccagcatggcaaggtggtgacctggaggacggccacattgtgcccccagagctgcgaggagaggaatctccgggagaacgggtatgagtgtgagtggcgctataacagctgtgcacctgcctgtcaagtcacgtgtcagcaccctgagccactggcctgccctgtgcagtgtgtggagggctgccatgcccactgccctccagggaaaatcctggatgagcttttgcagacctgcgttgaccctgaagactgtccagtgtgtgaggtggctggccggcgttttgcctcaggaaagaaagtcaccttgaatcccagtgaccctgagcactgccagatttgccactgtgatgttgtcaacctcacctgtgaagcctgccaggagccgggaggcctggtggtgcctcccacagatgccccggtgagccccaccactctgtatgtggaggacatctcggaaccgccgttgcacgatttctactgcagcaggctactggacctggtcttcctgctggatggctcctccaggctgtccgaggctgagtttgaagtgctgaaggcctttgtggtggacatgatggagcggctgcgcatctcccagaagtgggtccgcgtggccgtggtggagtaccacgacggctcccacgcctacatcgggctcaaggaccggaagcgaccgtcagagctgcggcgcattgccagccaggtgaagtatgcgggcagccaggtggcctccaccagcgaggtcttgaaatacacactgttccaaatcttcagcaagatcgaccgccctgaagcctcccgcatcgccctgctcctgatggccagccaggagccccaacggatgtcccggaactttgtccgctacgtccagggcctgaagaagaagaaggtcattgtgatcccggtgggcattgggccccatgccaacctcaagcagatccgcctcatcgagaagcaggcccctgagaacaaggccttcgtgctgagcagtgtggatgagctggagcagcaaagggacgagatcgttagctacctctgtgaccttgcccctgaagcccctcctcctactctgcccccccacatggcacaagtcactgtgggcccggggctcttgggggtttcgaccctggggcccaagaggaactccatggttctggatgtggcgttcgtcctggaaggatcggacaaaattggtgaagccgacttcaacaggagcaaggagttcatggaggaggtgattcagcggatggatgtgggccaggacagcatccacgtcacggtgctgcagtactcctacatggtgaccgtggagtaccccttcagcgaggcacagtccaaaggggacatcctgcagcgggtgcgagagatccgctaccagggcggcaacaggaccaacactgggctggccctgcggtacctctctgaccacagcttcttggtcagccagggtgaccgggagcaggcgcccaacctggtctacatggtcaccggaaatcctgcctctgatgagatcaagaggctgcctggagacatccaggtggtgcccattggagtgggccctaatgccaacgtgcaggagctggagaggattggctggcccaatgcccctatcctcatccaggactttgagacgctcccccgagaggctcctgacctggtgctgcagaggtgctgctccggagaggggctgcagatccccaccctctcccctgcacctgactgcagccagcccctggacgtgatccttctcctggatggctcctccagtttcccagcttcttattttgatgaaatgaagagtttcgccaaggctttcatttcaaaagccaatatagggcctcgtctcactcaggtgtcagtgctgcagtatggaagcatcaccaccattgacgtgccatggaacgtggtcccggagaaagcccatttgctgagccttgtggacgtcatgcagcgggagggaggccccagccaaatcggggatgccttgggctttgctgtgcgatacttgacttcagaaatgcatggtgccaggccgggagcctcaaaggcggtggtcatcctggtcacggacgtctctgtggattcagtggatgcagcagctgatgccgccaggtccaacagagtgacagtgttccctattggaattggagatcgctacgatgcagcccagctacggatcttggcaggcccagcaggcgactccaacgtggtgaagctccagcgaatcgaagacctccctaccatggtcaccttgggcaattccttcctccacaaactgtgctctggatttgttaggatttgcatggatgaggatgggaatgagaagaggcccggggacgtctggaccttgccagaccagtgccacaccgtgacttgccagccagatggccagaccttgctgaagagtcatcgggtcaactgtgaccgggggctgaggccttcgtgccctaacagccagtcccctgttaaagtggaagagacctgtggctgccgctggacctgcccctgcgtgtgcacaggcagctccactcggcacatcgtgacctttgatgggcagaatttcaagctgactggcagctgttcttatgtcctatttcaaaacaaggagcaggacctggaggtgattctccataatggtgcctgcagccctggagcaaggcagggctgcatgaaatccatcgaggtgaagcacagtgccctctccgtcgagctgcacagtgacatggaggtgacggtgaatgggagactggtctctgttccttacgtgggtgggaacatggaagtcaacgtttatggtgccatcatgcatgaggtcagattcaatcaccttggtcacatcttcacattcactccacaaaacaatgagttccaactgcagctcagccccaagacttttgcttcaaagacgtatggtctgtgtgggatctgtgatgagaacggagccaatgacttcatgctgagggatggcacagtcaccacagactggaaaacacttgttcaggaatggactgtgcagcggccagggcagacgtgccagcccatcctggaggagcagtgtcttgtccccgacagctcccactgccaggtcctcctcttaccactgtttgctgaatgccacaaggtcctggctccagccacattctatgccatctgccagcaggacagttgccaccaggagcaagtgtgtgaggtgatcgcctcttatgcccacctctgtcggaccaacggggtctgcgttgactggaggacacctgatttctgtgctatgtcatgcccaccatctctggtctacaaccactgtgagcatggctgtccccggcactgtgatggcaacgtgagctcctgtggggaccatccctccgaaggctgtttctgccctccagataaagtcatgttggaaggcagctgtgtccctgaagaggcctgcactcagtgcattggtgaggatggagtccagcaccagttcctggaagcctgggtcccggaccaccagccctgtcagatctgcacatgcctcagcgggcggaaggtcaactgcacaacgcagccctgccccacggccaaagctcccacgtgtggcctgtgtgaagtagcccgcctccgccagaatgcagaccagtgctgccccgagtatgagtgtgtgtgtgacccagtgagctgtgacctgcccccagtgcctcactgtgaacgtggcctccagcccacactgaccaaccctggcgagtgcagacccaacttcacctgcgcctgcaggaaggaggagtgcaaaagagtgtccccaccctcctgccccccgcaccgtttgcccacccttcggaagacccagtgctgtgatgagtatgagtgtgcctgcaactgtgtcaactccacagtgagctgtccccttgggtacttggcctcaaccgccaccaatgactgtggctgtaccacaaccacctgccttcccgacaaggtgtgtgtccaccgaagcaccatctaccctgtgggccagttctgggaggagggctgcgatgtgtgcacctgcaccgacatggaggatgccgtgatgggcctccgcgtggcccagtgctcccagaagccctgtgaggacagctgtcggtcgggcttcacttacgttctgcatgaaggcgagtgctgtggaaggtgcctgccatctgcctgtgaggtggtgactggctcaccgcggggggactcccagtcttcctggaagagtgtcggctcccagtgggcctccccggagaacccctgcctcatcaatgagtgtgtccgagtgaaggaggaggtctttatacaacaaaggaacgtctcctgcccccagctggaggtccctgtctgcccctcgggctttcagctgagctgtaagacctcagcgtgctgcccaagctgtcgctgtgagcgcatggaggcctgcatgctcaatggcactgtcattgggcccgggaagactgtgatgatcgatgtgtgcacgacctgccgctgcatggtgcaggtgggggtcatctctggattcaagctggagtgcaggaagaccacctgcaacccctgccccctgggttacaaggaagaaaataacacaggtgaatgttgtgggagatgtttgcctacggcttgcaccattcagctaagaggaggacagatcatgacactgaagcgtgatgagacgctccaggatggctgtgatactcacttctgcaaggtcaatgagagaggagagtacttctgggagaagagggtcacaggctgcccaccctttgatgaacacaagtgtctggctgagggaggtaaaattatgaaaattccaggcacctgctgtgacacatgtgaggagcctgagtgcaacgacatcactgccaggctgcagtatgtcaaggtgggaagctgtaagtctgaagtagaggtggatatccactactgccagggcaaatgtgccagcaaagccatgtactccattgacatcaacgatgtgcaggaccagtgctcctgctgctctccgacacggacggagcccatgcaggtggccctgcactgcaccaatggctctgttgtgtaccatgaggttctcaatgccatggagtgcaaatgctcccccaggaagtgcagcaagtga

SEQ ID NO: 445 - DNA, 8341 bp, Artificial sequence
  A novel predicted alternative spliced variant
atgattcctgccagatttgccggggtgctgcttgctctggccctcattttgccagggaccctttgtgcagaaggaactcgcggcaggtcatccacggcccgatgcagccttttcggaagtgacttcgtcaacacctttgatgggagcatgtacagctttgcgggatactgcagttacctcctggcagggggctgccagaaacgctccttctcgattattggggacttccagaatggcaagagagtgagcctctccgtgtatcttggggaattttttgacatccatttgtttgtcaatggtaccgtgacacagggggaccaaagagtctccatgccctatgcctccaaagggctgtatctagaaactgaggctgggtactacaagctgtccggtgaggcctatggctttgtggccaggatcgatggcagcggcaactttcaagtcctgctgtcagacagatacttcaacaagacctgcgggctgtgtggcaactttaacatctttgctgaagatgactttatgacccaagaagggaccttgacctcggacccttatgactttgccaactcatgggctctgagcagtggagaacagtggtgtgaacgggcatctcctcccagcagctcatgcaacatctcctctggggaaatgcagaagggcctgtgggagcagtgccagcttctgaagagcacctcggtgtttgcccgctgccaccctctggtggaccccgagccttttgtggccctgtgtgagaagactttgtgtgagtgtgctggggggctggagtgcgcctgccctgccctcctggagtacgcccggacctgtgcccaggagggaatggtgctgtacggctggaccgaccacagcgcgtgcagcccagtgtgccctgctggtatggagtataggcagtgtgtgtccccttgcgccaggacctgccagagcctgcacatcaatgaaatgtgtcaggagcgatgcgtggatggctgcagctgccctgagggacagctcctggatgaaggcctctgcgtggagagcaccgagtgtccctgcgtgcattccggaaagcgctaccctcccggcacctccctctctcgagactgcaacacctgcatttgccgaaacagccagtggatctgcagcaatgaagaatgtccaggggagtgccttgtcactggtcaatcccacttcaagagctttgacaacagatacttcaccttcagtgggatctgccagtacctgctggcccgggattgccaggaccactccttctccattgtcattgagactgtccagtgtgctgatgaccgcgacgctgtgtgcacccgctccgtcaccgtccggctgcctggcctgcacaacagccttgtgaaactgaagcatggggcaggagttgccatggatggccaggacatccagctccccctcctgaaagctgtcccccgtctacgccgggaagacctgcggcctgtgtgggaattacaatggcaaccagggcgacgacttccttaccccctctgggctggcagagccccgggtggaggacttcgggaacgcctggaagctgcacggggactgccaggacctgcagaagcagcacagcgatccctgcgccctcaacccgcgcatgaccaggttctccgaggaggcgtgcgcggtcctgacgtcccccacattcgaggcctgccatcgtgccgtcagcccgctgccctacctgcggaactgccgctacgacgtgtgctcctgctcggacggccgcgagtgcctgtgcggcgccctggccagctatgccgcggcctgcgcggggagaggcgtgcgcgtcgcgtggcgcgagccaggccgctgtgagctgaactgcccgaaaggccaggtgtacctgcagtgcgggaccccctgcaacctgacctgccgctctctctcttacccggatgaggaatgcaatgaggcctgcctggagggctgcttctgccccccagggctctacatggatgagaggggggactgcgtgcccaaggcccagtgcccctgttactatgacggtgagatcttccagccagaagacatcttctcagaccatcacaccatgtgctactgtgaggatggcttcatgcactgtaccatgagtggagtccccggaagcttgctgcctgacgctgtcctcagcagtcccctgtctcatcgcagcaaaaggagcctatcctgtcggccccccatggtcaagctggtgtgtcccgctgacaacctgcgggctgaagggctcgagtgtaccaaaacgtgccagaactatgacctggagtgcatgagcatgggctgtgtctctggctgcctctgccccccgggcatggtccggcatgagaacagatgtgtggccctggaaaggtgtccctgcttccatcagggcaaggagtatgcccctggagaaacagtgaagattggctgcaacacttgtgtctgtcgggaccggaagtggaactgcacagaccatgtgtgtgatgccacgtgctccacgatcggcatggcccactacctcaccttcgacgggctcaaatacctgttccccggggagtgccagtacgttctggtgcaggattactgcggcagtaaccctgggacctttcggatcctagtggggaataagggatgcagccacccctcagtgaaatgcaagaaacgggtcaccatcctggtggagggaggagagattgagctgtttgacggggaggtgaatgtgaagaggcccatgaaggatgagactcactttgaggtggtggagtctggccggtacatcattctgctgctgggcaaagccctctccgtggtctgggaccgccacctgagcatctccgtggtcctgaagcagacataccaggagaaagtgtgtggcctgtgtgggaattttgatggcatccagaacaatgacctcaccagcagcaacctccaagtggaggaagaccctgtggactttgggaactcctggaaagtgagctcgcagtgtgctgacaccagaaaagtgcctctggactcatcccctgccacctgccataacaacatcatgaagcagacgatggtggattcctcctgtagaatccttaccagtgacgtcttccaggactgcaacaagctggtggaccccgagccatatctggatgtctgcatttacgacacctgctcctgtgagtccattggggactgcgcctgcttctgcgacaccattgctgcctatgcccacgtgtgtgcccagcatggcaaggtggtgacctggaggacggccacattgtgcccccagagctgcgaggagaggaatctccgggagaacgggtatgagtgtgagtggcgctataacagctgtgcacctgcctgtcaagtcacgtgtcagcaccctgagccactggcctgccctgtgcagtgtgtggagggctgccatgcccactgccctccagggaaaatcctggatgagcttttgcagacctgcgttgaccctgaagactgtccagtgtgtgaggtggctggccggcgttttgcctcaggaaagaaagtcaccttgaatcccagtgaccctgagcactgccagatttgccactgtgatgttgtcaacctcacctgtgaagcctgccaggagccgggaggcctggtggtgcctcccacagatgccccggtgagccccaccactctgtatgtggaggacatctcggaaccgccgttgcacgatttctactgcagcaggctactggacctggtcttcctgctggatggctcctccaggctgtccgaggctgagtttgaagtgctgaaggcctttgtggtggacatgatggagcggctgcgcatctcccagaagtgggtccgcgtggccgtggtggagtaccacgacggctcccacgcctacatcgggctcaaggaccggaagcgaccgtcagagctgcggcgcattgccagccaggtgaagtatgcgggcagccaggtggcctccaccagcgaggtcttgaaatacacactgttccaaatcttcagcaagatcgaccgccctgaagcctcccgcatcgccctgctcctgatggccagccaggagccccaacggatgtcccggaactttgtccgctacgtccagggcctgaagaagaagaaggtcattgtgatcccggtgggcattgggccccatgccaacctcaagcagatccgcctcatcgagaagcaggcccctgagaacaaggccttcgtgctgagcagtgtggatgagctggagcagcaaagggacgagatcgttagctacctctgtgaccttgcccctgaagcccctcctcctactctgcccccccacatggcacaagtcactgtgggcccggggctcttgggggtttcgaccctggggcccaagaggaactccatggttctggatgtggcgttcgtcctggaaggatcggacaaaattggtgaagccgacttcaacaggagcaaggagttcatggaggaggtgattcagcggatggatgtgggccaggacagcatccacgtcacggtgctgcagtactcctacatggtgaccgtggagtaccccttcagcgaggcacagtccaaaggggacatcctgcagcgggtgcgagagatccgctaccagggcggcaacaggaccaacactgggctggccctgcggtacctctctgaccacagcttcttggtcagccagggtgaccgggagcaggcgcccaacctggtctacatggtcaccggaaatcctgcctctgatgagatcaagaggctgcctggagacatccaggtggtgcccattggagtgggccctaatgccaacgtgcaggagctggagaggattggctggcccaatgcccctatcctcatccaggactttgagacgctcccccgagaggctcctgacctggtgctgcagaggtgctgctccggagaggggctgcagatccccaccctctcccctgcacctgactgcagccagcccctggacgtgatccttctcctggatggctcctccagtttcccagcttcttattttgatgaaatgaagagtttcgccaaggctttcatttcaaaagccaatatagggcctcgtctcactcaggtgtcagtgctgcagtatggaagcatcaccaccattgacgtgccatggaacgtggtcccggagaaagcccatttgctgagccttgtggacgtcatgcagcgggagggaggccccagccaaatcggggatgccttgggctttgctgtgcgatacttgacttcagaaatgcatggtgccaggccgggagcctcaaaggcggtggtcatcctggtcacggacgtctctgtggattcagtggatgcagcagctgatgccgccaggtccaacagagtgacagtgttccctattggaattggagatcgctacgatgcagcccagctacggatcttggcaggcccagcaggcgactccaacgtggtgaagctccagcgaatcgaagacctccctaccatggtcaccttgggcaattccttcctccacaaactgtgctctggatttgttaggatttgcatggatgaggatgggaatgagaagaggcccggggacgtctggaccttgccagaccagtgccacaccgtgacttgccagccagatggccagaccttgctgaagagtcatcgggtcaactgtgaccgggggctgaggccttcgtgccctaacagccagtcccctgttaaagtggaagagacctgtggctgccgctggacctgcccctgcgtgtgcacaggcagctccactcggcacatcgtgacctttgatgggcagaatttcaagctgactggcagctgttcttatgtcctatttcaaaacaaggagcaggacctggaggtgattctccataatggtgcctgcagccctggagcaaggcagggctgcatgaaatccatcgaggtgaagcacagtgccctctccgtcgagctgcacagtgacatggaggtgacggtgaatgggagactggtctctgttccttacgtgggtgggaacatggaagtcaacgtttatggtgccatcatgcatgaggtcagattcaatcaccttggtcacatcttcacattcactccacaaaacaatgagttccaactgcagctcagccccaagacttttgcttcaaagacgtatggtctgtgtgggatctgtgatgagaacggagccaatgacttcatgctgagggatggcacagtcaccacagactggaaaacacttgttcaggaatggactgtgcagcggccagggcagacgtgccagcccatcctggaggagcagtgtcttgtccccgacagctcccactgccaggtcctcctcttaccactgtttgctgaatgccacaaggtcctggctccagccacattctatgccatctgccagcaggacagttgccaccaggagcaagtgtgtgaggtgatcgcctcttatgcccacctctgtcggaccaacggggtctgcgttgactggaggacacctgatttctgtgctatgtcatgcccaccatctctggtctacaaccactgtgagcatggctgtccccggcactgtgatggcaacgtgagctcctgtggggaccatccctccgaaggctgtttctgccctccagataaagtcatgttggaaggcagctgtgtccctgaagaggcctgcactcagtgcattggtgaggatggagtccagcaccagttcctggaagcctgggtcccggaccaccagccctgtcagatctgcacatgcctcagcgggcggaaggtcaactgcacaacgcagccctgccccacggccaaagctcccacgtgtggcctgtgtgaagtagcccgcctccgccagaatgcagaccagtgctgccccgagtatgagtgtgtgtgtgacccagtgagctgtgacctgcccccagtgcctcactgtgaacgtggcctccagcccacactgaccaaccctggcgagtgcagacccaacttcacctgcgcctgcaggaaggaggagtgcaaaagagtgtccccaccctcctgccccccgcaccgtttgcccacccttcggaagacccagtgctgtgatgagtatgagtgtgcctgcaactgtgtcaactccacagtgagctgtccccttgggtacttggcctcaaccgccaccaatgactgtggctgtaccacaaccacctgccttcccgacaaggtgtgtgtccaccgaagcaccatctaccctgtgggccagttctgggaggagggctgcgatgtgtgcacctgcaccgacatggaggatgccgtgatgggcctccgcgtggcccagtgctcccagaagccctgtgaggacagctgtcggtcgggcttcacttacgttctgcatgaaggcgagtgctgtggaaggtgcctgccatctgcctgtgaggtggtgactggctcaccgcggggggactcccagtcttcctggaagagtgtcggctcccagtgggcctccccggagaacccctgcctcatcaatgagtgtgtccgagtgaaggaggaggtctttatacaacaaaggaacgtctcctgcccccagctggaggtccctgtctgcccctcgggctttcagctgagctgtaagacctcagcgtgctgcccaagctgtcgctgtgagcgcatggaggcctgcatgctcaatggcactgtcattgggcccgggaagactgtgatgatcgatgtgtgcacgacctgccgctgcatggtgcaggtgggggtcatctctggattcaagctggagtgcaggaagaccacctgcaacccctgccccctgggttacaaggaagaaaataacacaggtgaatgttgtgggagatgtttgcctacggcttgcaccattcagctaagaggaggacagatcatgacactgaagcgtgatgagacgctccaggatggctgtgatactcacttctgcaaggtcaatgagagaggagagtacttctgggagaagagggtcacaggctgcccaccctttgatgaacacaagtgtctggctgagggaggtaaaattatgaaaattccaggcacctgctgtgacacatgtgaggagcctgagtgcaacgacatcactgccaggctgcagtatgtcaaggtgggaagctgtaagtctgaagtagaggtggatatccactactgccagggcaaatgtgccagcaaagccatgtactccattgacatcaacgatgtgcaggaccagtgctcctgctgctctccgacacggacggagcccatgcaggtggccctgcactgcaccaatggctctgttgtgtaccatgaggttctcaatgccatggagtgcaaatgctcccccaggaagtgcagcaagtga

SEQ ID NO: 446 - DNA, 8325 bp, Artificial sequence
  A novel predicted alternative spliced variant
atgattcctgccagatttgccggggtgctgcttgctctggccctcattttgccagggaccctttgtgcagaaggaactcgcggcaggtcatccacggcccgatgcagccttttcggaagtgacttcgtcaacacctttgatgggagcatgtacagctttgcgggatactgcagttacctcctggcagggggctgccagaaacgctccttctcgattattggggacttccagaatggcaagagagtgagcctctccgtgtatcttggggaattttttgacatccatttgtttgtcaatggtaccgtgacacagggggaccaaagagtctccatgccctatgcctccaaagggctgtatctagaaactgaggctgggtactacaagctgtccggtgaggcctatggctttgtggccaggatcgatggcagcggcaactttcaagtcctgctgtcagacagatacttcaacaagacctgcgggctgtgtggcaactttaacatctttgctgaagatgactttatgacccaagaagggaccttgacctcggacccttatgactttgccaactcatgggctctgagcagtggagaacagtggtgtgaacgggcatctcctcccagcagctcatgcaacatctcctctggggaaatgcagaagggcctgtgggagcagtgccagcttctgaagagcacctcggtgtttgcccgctgccaccctctggtggaccccgagccttttgtggccctgtgtgagaagactttgtgtgagtgtgctggggggctggagtgcgcctgccctgccctcctggagtacgcccggacctgtgcccaggagggaatggtgctgtacggctggaccgaccacagcgcgtgcagcccagtgtgccctgctggtatggagtataggcagtgtgtgtccccttgcgccaggacctgccagagcctgcacatcaatgaaatgtgtcaggagcgatgcgtggatggctgcagctgccctgagggacagctcctggatgaaggcctctgcgtggagagcaccgagtgtccctgcgtgcattccggaaagcgctaccctcccggcacctccctctctcgagactgcaacacctgcatttgccgaaacagccagtggatctgcagcaatgaagaatgtccaggggagtgccttgtcactggtcaatcccacttcaagagctttgacaacagatacttcaccttcagtgggatctgccagtacctgctggcccgggattgccaggaccactccttctccattgtcattgagactgtccagtgtgctgatgaccgcgacgctgtgtgcacccgctccgtcaccgtccggctgcctggcctgcacaacagccttgtgaaactgaagcatggggcaggagttgccatggatggccaggacatccagctccccctcctgaaaggtgacctccgcatccagcatacagtgacggcctccgtgcgcctcagctacggggaggacctgcagatggactgggatggccgcgggaggctgctggtgaagctgtcccccgtctacgccgggaagacctgcggcctgtgtgggaattacaatggcaaccagggcgacgacttccttaccccctctgggctggcagagccccgggtggaggacttcgggaacgcctggaagctgcacggggactgccaggacctgcagaagcagcacagcgatccctgcgccctcaacccgcgcatgaccaggttctccgaggaggcgtgcgcggtcctgacgtcccccacattcgaggcctgccatcgtgccgtcagcccgctgccctacctgcggaactgccgctacgacgtgtgctcctgctcggacggccgcgagtgcctgtgcggcgccctggccagctatgccgcggcctgcgcggggagaggcgtgcgcgtcgcgtggcgcgagccaggccgctgtgagctgaactgcccgaaaggccaggtgtacctgcagtgcgggaccccctgcaacctgacctgccgctctctctcttacccggatgaggaatgcaatgaggcctgcctggagggctgcttctgccccccagggctctacatggatgagaggggggactgcgtgcccaaggcccagtgcccctgttactatgacggtgagatcttccagccagaagacatcttctcagaccatcacaccatgtgctactgtgaggatggcttcatgcactgtaccatgagtggagtccccggaagcttgctgcctgacgctgtcctcagcagtcccctgtctcatcgcagcaaaaggagcctatcctgtcggccccccatggtcaagctggtgtgtcccgctgacaacctgcgggctgaagggctcgagtgtaccaaaacgtgccagaactatgacctggagtgcatgagcatgggctgtgtctctggctgcctctgccccccgggcatggtccggcatgagaacagatgtgtggccctggaaaggtgtccctgcttccatcagggcaaggagtatgcccctggagaaacagtgaagattggctgcaacacttgtgtctgtcgggaccggaagtggaactgcacagaccatgtgtgtgatgccacgtgctccacgatcggcatggcccactacctcaccttcgacgggctcaaatacctgttccccggggagtgccagtacgttctggtgcaggattactgcggcagtaaccctgggacctttcggatcctagtggggaataagggatgcagccacccctcagtgaaatgcaagaaacgggtcaccatcctggtggagggaggagagattgagctgtttgacggggaggtgaatgtgaagaggcccatgaaggatgagactcactttgaggtggtggagtctggccggtacatcattctgctgctgggcaaagccctctccgtggtctgggaccgccacctgagcatctccgtggtcctgaagcagacataccaggagaaagtgtgtggcctgtgtgggaattttgatggcatccagaacaatgacctcaccagcagcaacctccaagtggaggaagaccctgtggactttgggaactcctggaaagtgagctcgcagtgtgctgacaccagaaaagtgcctctggactcatcccctgccacctgccataacaacatcatgaagcagacgatggtggattcctcctgtagaatccttaccagtgacgtcttccaggactgcaacaagctggtggaccccgagccatatctggatgtctgcatttacgacacctgctcctgtgagtccattggggactgcgcctgcttctgcgacaccattgctgcctatgcccacgtgtgtgcccagcatggcaaggtggtgacctggaggacggccacattgtgcccccagagctgcgaggagaggaatctccgggagaacgggtatgagtgtgagtggcgctataacagctgtgcacctgcctgtcaagtcacgtgtcagcaccctgagccactggcctgccctgtgcagtgtgtggagggctgccatgcccactgccctccagggaaaatcctggatgagcttttgcagacctgcgttgaccctgaagactgtccagtgtgtgaggtggctggccggcgttttgcctcaggaaagaaagtcaccttgaatcccagtgaccctgagcactgccagatttgccactgtgatgttgtcaacctcacctgtgaagcctgccaggagccgggaggcctggtggtgcctcccacagatgccccggtgagccccaccactctgtatgtggaggacatctcggaaccgccgttgcacgatttctactgcagcaggctactggacctggtcttcctgctggatggctcctccaggctgtccgaggctgagtttgaagtgctgaaggcctttgtggtggacatgatggagcggctgcgcatctcccagaagtgggtccgcgtggccgtggtggagtaccacgacggctcccacgcctacatcgggctcaaggaccggaagcgaccgtcagagctgcggcgcattgccagccaggtgaagtatgcgggcagccaggtggcctccaccagcgaggtcttgaaatacacactgttccaaatcttcagcaagatcgaccgccctgaagcctcccgcatcgccctgctcctgatggccagccaggagccccaacggatgtcccggaactttgtccgctacgtccagggcctgaagaagaagaaggtcattgtgatcccggtgggcattgggccccatgccaacctcaagcagatccgcctcatcgagaagcaggcccctgagaacaaggccttcgtgctgagcagtgtggatgagctggagcagcaaagggacgagatcgttagctacctctgtgaccttgcccctgaagcccctcctcctactctgcccccccacatggcacaagtcactgtgggcccggggctcttgggggtttcgaccctggggcccaagaggaactccatggttctggatgtggcgttcgtcctggaaggatcggacaaaattggtgaagccgacttcaacaggagcaaggagttcatggaggaggtgattcagcggatggatgtgggccaggacagcatccacgtcacggtgctgcagtactcctacatggtgaccgtggagtaccccttcagcgaggcacagtccaaaggggacatcctgcagcgggtgcgagagatccgctaccagggcggcaacaggaccaacactgggctggccctgcggtacctctctgaccacagcttcttggtcagccagggtgaccgggagcaggcgcccaacctggtctacatggtcaccggaaatcctgcctctgatgagatcaagaggctgcctggagacatccaggtggtgcccattggagtgggccctaatgccaacgtgcaggagctggagaggattggctggcccaatgcccctatcctcatccaggactttgagacgctcccccgagaggctcctgacctggtgctgcagaggtgctgctccggagaggggctgcagatccccaccctctcccctgcacctgggcctcgtctcactcaggtgtcagtgctgcagtatggaagcatcaccaccattgacgtgccatggaacgtggtcccggagaaagcccatttgctgagccttgtggacgtcatgcagcgggagggaggccccagccaaatcggggatgccttgggctttgctgtgcgatacttgacttcagaaatgcatggtgccaggccgggagcctcaaaggcggtggtcatcctggtcacggacgtctctgtggattcagtggatgcagcagctgatgccgccaggtccaacagagtgacagtgttccctattggaattggagatcgctacgatgcagcccagctacggatcttggcaggcccagcaggcgactccaacgtggtgaagctccagcgaatcgaagacctccctaccatggtcaccttgggcaattccttcctccacaaactgtgctctggatttgttaggatttgcatggatgaggatgggaatgagaagaggcccggggacgtctggaccttgccagaccagtgccacaccgtgacttgccagccagatggccagaccttgctgaagagtcatcgggtcaactgtgaccgggggctgaggccttcgtgccctaacagccagtcccctgttaaagtggaagagacctgtggctgccgctggacctgcccctgcgtgtgcacaggcagctccactcggcacatcgtgacctttgatgggcagaatttcaagctgactggcagctgttcttatgtcctatttcaaaacaaggagcaggacctggaggtgattctccataatggtgcctgcagccctggagcaaggcagggctgcatgaaatccatcgaggtgaagcacagtgccctctccgtcgagctgcacagtgacatggaggtgacggtgaatgggagactggtctctgttccttacgtgggtgggaacatggaagtcaacgtttatggtgccatcatgcatgaggtcagattcaatcaccttggtcacatcttcacattcactccacaaaacaatgagttccaactgcagctcagccccaagacttttgcttcaaagacgtatggtctgtgtgggatctgtgatgagaacggagccaatgacttcatgctgagggatggcacagtcaccacagactggaaaacacttgttcaggaatggactgtgcagcggccagggcagacgtgccagcccatcctggaggagcagtgtcttgtccccgacagctcccactgccaggtcctcctcttaccactgtttgctgaatgccacaaggtcctggctccagccacattctatgccatctgccagcaggacagttgccaccaggagcaagtgtgtgaggtgatcgcctcttatgcccacctctgtcggaccaacggggtctgcgttgactggaggacacctgatttctgtgctatgtcatgcccaccatctctggtctacaaccactgtgagcatggctgtccccggcactgtgatggcaacgtgagctcctgtggggaccatccctccgaaggctgtttctgccctccagataaagtcatgttggaaggcagctgtgtccctgaagaggcctgcactcagtgcattggtgaggatggagtccagcaccagttcctggaagcctgggtcccggaccaccagccctgtcagatctgcacatgcctcagcgggcggaaggtcaactgcacaacgcagccctgccccacggccaaagctcccacgtgtggcctgtgtgaagtagcccgcctccgccagaatgcagaccagtgctgccccgagtatgagtgtgtgtgtgacccagtgagctgtgacctgcccccagtgcctcactgtgaacgtggcctccagcccacactgaccaaccctggcgagtgcagacccaacttcacctgcgcctgcaggaaggaggagtgcaaaagagtgtccccaccctcctgccccccgcaccgtttgcccacccttcggaagacccagtgctgtgatgagtatgagtgtgcctgcaactgtgtcaactccacagtgagctgtccccttgggtacttggcctcaaccgccaccaatgactgtggctgtaccacaaccacctgccttcccgacaaggtgtgtgtccaccgaagcaccatctaccctgtgggccagttctgggaggagggctgcgatgtgtgcacctgcaccgacatggaggatgccgtgatgggcctccgcgtggcccagtgctcccagaagccctgtgaggacagctgtcggtcgggcttcacttacgttctgcatgaaggcgagtgctgtggaaggtgcctgccatctgcctgtgaggtggtgactggctcaccgcggggggactcccagtcttcctggaagagtgtcggctcccagtgggcctccccggagaacccctgcctcatcaatgagtgtgtccgagtgaaggaggaggtctttatacaacaaaggaacgtctcctgcccccagctggaggtccctgtctgcccctcgggctttcagctgagctgtaagacctcagcgtgctgcccaagctgtcgctgtgagcgcatggaggcctgcatgctcaatggcactgtcattgggcccgggaagactgtgatgatcgatgtgtgcacgacctgccgctgcatggtgcaggtgggggtcatctctggattcaagctggagtgcaggaagaccacctgcaacccctgccccctgggttacaaggaagaaaataacacaggtgaatgttgtgggagatgtttgcctacggcttgcaccattcagctaagaggaggacagatcatgacactgaagcgtgatgagacgctccaggatggctgtgatactcacttctgcaaggtcaatgagagaggagagtacttctgggagaagagggtcacaggctgcccaccctttgatgaacacaagtgtctggctgagggaggtaaaattatgaaaattccaggcacctgctgtgacacatgtgaggagcctgagtgcaacgacatcactgccaggctgcagtatgtcaaggtgggaagctgtaagtctgaagtagaggtggatatccactactgccagggcaaatgtgccagcaaagccatgtactccattgacatcaacgatgtgcaggaccagtgctcctgctgctctccgacacggacggagcccatgcaggtggccctgcactgcaccaatggctctgttgtgtaccatgaggttctcaatgccatggagtgcaaatgctcccccaggaagtgcagcaagtga

SEQ ID NO: 447 - DNA, 2825 bp, Artificial sequence
  A novel predicted alternative spliced variant
atggaaccacaggttactctaaatgtgacttttaaaaatgaaattcaaagctttctggtttctgatccagaaaatacaacttgggctgatatcgaagctatggtaaaagtttcatttgatctgaatactattcaaataaaatacctggatgaggaaaatgaagaggtatccatcaacagtcaaggagaatatgaagaagcgcttaagatggcagttaaacagggaaaccaactgcagatgcaagtccacgaagggcaccatgtcgttgatgaagccccacccccagttgtaggagcaaaacgactagctgccagggcagggaagaagccacttgcacattactcttcactggtgagagtcttgggatcagacatgaagaccccagaggatcctgcagtgcagtcgtttccacttgttccatgtgacacagaccagcctcaagacaagcccccagactggttcacaagctacctggagacgttcagagaacaagtggttaacgaaacggttgagaagcttgaacagaaattacatgaaaagcttgtcctccagaacccatccttgggttcttgtccctcagaagtctcaatgcctacttcagaagaaacattgtttttgccagaaaaccagttcagctggcatattgcttgcaacaactgccaaagaaggattgttggtgtccgctaccagtgtagcctatgcccatcctacaatatctgtgaagattgtgaagcagggccatatggccatgacactaaccacgtcctgctgaagttgcggagacctgttgtgggctcctctgaaccgttctgtcactcaaagtactctactcctcgtcttcctgctgctctggaacaagtcaggctccagaaacaggttgataagaactttcttaaagcagaaaagcaaaggttgcgagctgagaagaaacaacgtaaagcagaggtcaaggaacttaaaaagcagcttaaactccataggaaaattcacctgtggaattcaatccatggactccagagccccaagtctcctttaggccgacctgagagcttgctccagtctaataccctgatgctccctttgcagccctgtacctccgttatgccaatgctcagtgcagcatttgtggatgagaatttgcctgatgggactcaccttcagccaggaaccaagtttatcaaacactggaggatgaaaaatacaggaaatgtaaagtggagtgcagacacaaagctcaagttcatgtggggaaacctgactttggcttccacagaaaagaaggatgttttggttccctgcctcaaggccggccatgtgggagttgtatctgtggagttcattgccccagccttggagggaacgtatacttcccattggcgtctttctcacaaaggccagcaatttgggcctcgggtctggtgcagtatcatagtagatcctttcccctccgaagagagccctgataacattgaaaagggcatgatcagctcaagcaaaactgatgatctcacctgccagcaagaggaaacttttcttctggctaaagaagaaagacagcttggtgaagtgactgagcagacagaagggacagcagcctgcatcccacagaaggcaaaaaatgttgccagtgagagggagctctacatcccatctgtggatcttctgactgcccagatgtgactccctgcatgtctcctctgccacatgacagtcctttaatagagaagccaggcttggggcagatagaggaagagaatgaaggggcaggatttaaagcacttcctgattctatggtgtcagtaaagaggaaggctgagaacattgcttctgtggaggaagcagaagaagacctgagtgggacccagtttgtgtgtgagacagtaatccgatcccttaccttggatgctgccccagaccacaaccctccttgcagacagaagtccttgcagatgacatttgccttgcctgaaggaccacttggaaatgagaaggaggagattatccatatcgctgaggaagaagctgtcatggaggaggaggaggatgaggaggatgaggaggaggaggatgagctcaaagatgaagttcaaagtcagtcctctgcttcctcagaggattacatcatcatcctgcctgagtgctttgataccagccgccccctgggggattctatgtacagctctgcgctctcacagccaggcctggagcgaggtgctgaaggcaagcctggggttgaggctgggcaggaaccagctgaggctggggaaagactccctggaggggagaaccagccacaggagcacagcataagtgacatcctcacgacctcacagactctggaaacagtgcccctaatcccagaggtagtggagcttccaccgtcactgcccaggagctctccttgtgtacatcatcatggttccccaggagtggatttaccagttaccataccagaagtttcttcagtccctgatcagatcagaggagagcccagaggctcatcaggacttgtaaacagcagacagaagagctatgaccactcaaggcaccatcatgggagcagcattgctggaggactggtgaagggggctttgtctgttgctgcctctgcatacaaggccctgtttgctgggccaccagtcactgcacagccaataatttctgaagatcagacagcagccctgatggcccatctctttgaaatgggattctgtgacaggcagctgaacctacggctgctgaagaaacacaattacaatatcctgcaggttgtgacagaacttcttcagttaaacaacaacgactggtacagccaacgctattga

SEQ ID NO: 448 - DNA, 2790 bp, Artificial sequence
  A novel predicted alternative spliced variant
atggaaccacaggttactctaaatgtgacttttaaaaatgaaattcaaagctttctggtttctgatccagaaaatacaacttgggctgatatcgaagctatggtaaaagtttcatttgatctgaatactattcaaataaaatacctggatgaggaaaatgaagaggtatccatcaacagtcaaggagaatatgaagaagcgcttaagatggcagttaaacagggaaaccaactgcagatgcaagtccacgaagggcaccatgtcgttgatgaagccccacccccagttgtaggagcaaaacgactagctgccagggcagggaagaagccacttgcacattactcttcactggtgagagtcttgggatcagacatgaagaccccagaggatcctgcagtgcagtcgtttccacttgttccatgtgacacagaccagcctcaagacaagcccccagactggttcacaagctacctggagacgttcagagaacaagtggttaacgaaacggttgagaagcttgaacagaaattacatgaaaagcttgtcctccagaacccatccttgggttcttgtccctcagaagtctcaatgcctacttcagaagaaacattgtttttgccagaaaaccagttcagctggcatattgcttgcaacaactgccaaagaaggattgttggtgtccgctaccagtgtagcctatgcccatcctacaatatctgtgaagattgtgaagcagggccatatggccatgacactaaccacgtcctgctgaagttgcggagacctgttgtgggctcctctgaaccgttctgtcactcaaagtactctactcctcgtcttcctgctgctctggaacaagtcaggctccagaaacaggttgataagaactttcttaaagcagaaaagcaaaggttgcgagctgagaagaaacaacgtaaagcagaggtcaaggaacttaaaaagcagcttaaactccataggaaaattcacctgtggaattcaatccatggactccagagccccaagtctcctttaggccgacctgagagcttgctccagtctaataccctgatgctccctttgcagccctgtacctccgttatgccaatgctcagtgcagcatttgtggatgagaatttgcctgatgggactcaccttcagccaggaaccaagtttatcaaacactggaggatgaaaaatacaggaaatgtaaagtggagtgcagacacaaagctcaagttcatgtggggaaacctgactttggcttccacagaaaagaaggatgttttggttccctgcctcaaggccggccatgtgggagttgtatctgtggagttcattgccccagccttggagggaacgtatacttcccattggcgtctttctcacaaaggccagcaatttgggcctcgggtctggtgcagtatcatagtagatcctttcccctccgaagagagccctgataacattgaaaagggcatgatcagctcaagcaaaactgatgatctcacctgccagcaagaggaaacttttcttctggctaaagaagaaagacagcttggtgaagtgactgagcagacagaagggacagcagcctgcatcccacagaaggcaaaaaatgttgccagtgagagggagctctacatcccatctgtggatcttctgactgcccaggacctgctgtcctttgagctgttggatataaacattgttcaagagttggagagagtgccccacaacacccctgtggattctatggtgtcagtaaagaggaaggctgagaacattgcttctgtggaggaagcagaagaagacctgagtgggacccagtttgtgtgtgagacagtaatccgatcccttaccttggatgctgccccagaccacaaccctccttgcagacagaagtccttgcagatgacatttgccttgcctgaaggaccacttggaaatgagaaggaggagattatccatatcgctgaggaagaagctgtcatggaggaggaggaggatgaggaggatgaggaggaggaggatgagctcaaagatgaagttcaaagtcagtcctctgcttcctcagaggattacatcatcatcctgcctgagtgctttgataccagccgccccctgggggattctatgtacagctctgcgctctcacagccaggcctggagcgaggtgctgaaggcaagcctggggttgaggctgggcaggaaccagctgaggctggggaaagactccctggaggggagaaccagccacaggagcacagcataagtgacatcctcacgacctcacagactctggaaacagtgcccctaatcccagaggtagtggagcttccaccgtcactgcccaggagctctccttgtgtacatcatcatggttccccaggagtggatttaccagttaccataccagaagtttcttcagtccctgatcagatcagaggagagcccagaggctcatcaggacttgtaaacagcagacagaagagctatgaccactcaaggcaccatcatgggagcagcattgctggaggactggtgaagggggctttgtctgttgctgcctctgcatacaaggccctgtttgctgggccaccagtcactgcacagccaataatttctgaagatcagacagcagccctgatggcccatctctttgaaatgggattctgtgacaggcagctgaacctacggctgctgaagaaacacaattacaatatcctgcaggttgtgacagaacttcttcagttaaacaacaacgactggtacagccaacgctattga

SEQ ID NO: 449 - DNA, 2795 bp, Artificial sequence
  A novel predicted alternative spliced variant
atggaaccacaggttactctaaatgtgacttttaaaaatgaaattcaaagctttctggtttctgatccagaaaatacaacttgggctgatatcgaagctatggtaaaagtttcatttgatctgaatactattcaaataaaatacctggatgaggaaaatgaagaggtatccatcaacagtcaaggagaatatgaagaagcgcttaagatggcagttaaacagggaaaccaactgcagatgcaagtccacgaagggcaccatgtcgttgatgaagccccacccccagttgtaggagcaaaacgactagctgccagggcagggaagaagccacttgcacattactcttcactggtgagagtcttgggatcagacatgaagaccccagaggatcctgcagtgcagtcgtttccacttgttccatgtgacacagaccagcctcaagacaagcccccagactggttcacaagctacctggagacgttcagagaacaagtggttaacgaaacggttgagaagcttgaacagaaattacatgaaaagcttgtcctccagaacccatccttgggttcttgtccctcagaagtctcaatgcctacttcagaagaaacattgtttttgccagaaaaccagttcagctggcatattgcttgcaacaactgccaaagaaggattgttggtgtccgctaccagtgtagcctatgcccatcctacaatatctgtgaagattgtgaagcagggccatatggccatgacactaaccacgtcctgctgaagttgcggagacctgttgtgggctcctctgaaccgttctgtcactcaaagtactctactcctcgtcttcctgctgctctggaacaagtcaggctccagaaacaggttgataagaactttcttaaagcagaaaagcaaaggttgcgagctgagaagaaacaacgtaaagcagaggtcaaggaacttaaaaagcagcttaaactccataggaaaattcacctgtggaattcaatccatggactccagagccccaagtctcctttaggccgacctgagagcttgctccagtctaataccctgatgctccctttgcagccctgtacctccgttatgccaatgctcagtgcagcatttgtggatgagaatttgcctgatgggactcaccttcagccaggaaccaagtttatcaaacactggaggatgaaaaatacaggaaatgtaaagtggagtgcagacacaaagctcaagttcatgtggggaaacctgactttggcttccacagaaaagaaggatgttttggttccctgcctcaaggccggccatgtgggagttgtatctgtggagttcattgccccagccttggagggaacgtatacttcccattggcgtctttctcacaaaggccagcaatttgggcctcgggtctggtgcagtatcatagtagatcctttcccctccgaagagagccctgataacattgaaaagggcatgatcagctcaagcaaaactgatgatctcacctgccagcaagaggaaacttttcttctggctaaagaagaaagacagcttggtgaagtgactgagcagacagaagggacagcagcctgcatcccacagaaggcaaaaaatgttgccagtgagagggagctctacatcccatctgtggatcttctgactgcccaggacctgctgtcctttgagctgttggatataaacattgttcaagagttggagagagtgccccacaacacccctgtggatgtgactccctgcatgtctcctctgccacatgacagtcctttaatagagaagccaggcttggggcagatagaggaagagaatgaaggggcaggatttaaagcacttcctgattctatggtgtcagtaaagaggaaggctgagaacattgcttctgtggaggaagcagaagaagacctgagtgggacccagtttgtgtgtgagacagtaatccgatcccttaccttggatgctgccccagaccacaaccctccttgcagacagaagtccttgcagatgacatttgccttgcctgaaggaccacttggaaatgagaaggaggagattatccatatcgctgaggaagaagctgtcatggaggaggaggaggatgaggaggatgaggaggaggaggatgagctcaaagatgaagttcaaagtcagtcctctgcttcctcagaggattacatcatcatcctgcctgagtgctttgataccagccgccccctgggggattctatgtacagctctgcgctctcacagccaggcctggagcgaggtgctgaaggcaagcctggggttgaggctgggcaggaaccagctgaggctggggaaagactccctggaggggagaaccagccacaggagcacagcataagtgacatcctcacgacctcacagactctggaaacagtgcccctaatcccagaggtagtggagcttccaccgtcactgcccaggagctctccttgtgtacatcatcatggttccccaggagtggatttaccagttaccataccagaagtttcttcagtccctgatcagatcagaggagagcccagaggctcatcaggacttgtaaacagcagacagaagagctatgaccactcaagccaataatttctgaagatcagacagcagccctgatggcccatctctttgaaatgggattctgtgacaggcagctgaacctacggctgctgaagaaacacaattacaatatcctgcaggttgtgacagaacttcttcagttaaacaacaacgactggtacagccaacgctattga

SEQ ID NO: 450 - protein, 228 aa, Homo sapiens
MLHVEMLTLVFLVLWMCVFSQDPGSKAVADRYAVYWNSSNPRFQRGDYHIDVCINDYLDVFCPHYEDSVPEDKTERYVLYMVNFDGYSACDHTSKGFKRWECNRPHSPNGPLKFSEKFQLFTPFSLGFEFRPGREYFYISSAIPDNGRRSCLKLKVFVRPTNSCMKTIGVHDRVFDVNDKVENSLEPADDTVHESAEPSRGENAAQTPRIPSRLLAILLFLLAMLLTL

SEQ ID NO: 451 - DNA, 1574 bp, Homo sapiens
gcttctctccatcttgtgattcctttttcctcctgaaccctccagtgggggtgcgagtttgtctttatcaccccccatcccaccgccttcttttcttctcgctctcctacccctccccagcttggtgggcgcctctttcctttctcgccccctttcatttttatttattcatatttatttggcgcccgctctctctctgtccctttgcctgcctccctccctccggatccccgctctctccccggagtggcgcgtcgggggctccgccgctggccaggcgtgatgttgcacgtggagatgttgacgctggtgtttctggtgctctggatgtgtgtgttcagccaggacccgggctccaaggccgtcgccgaccgctacgctgtctactggaacagcagcaaccccagattccagaggggtgactaccatattgatgtctgtatcaatgactacctggatgttttctgccctcactatgaggactccgtcccagaagataagactgagcgctatgtcctctacatggtgaactttgatggctacagtgcctgcgaccacacttccaaagggttcaagagatgggaatgtaaccggcctcactctccaaatggaccgctgaagttctctgaaaaattccagctcttcactcccttttctctaggatttgaattcaggccaggccgagaatatttctacatctcctctgcaatcccagataatggaagaaggtcctgtctaaagctcaaagtctttgtgagaccaacaaatagctgtatgaaaactataggtgttcatgatcgtgttttcgatgttaacgacaaagtagaaaattcattagaaccagcagatgacaccgtacatgagtcagccgagccatcccgcggcgagaacgcggcacaaacaccaaggatacccagccgccttttggcaatcctactgttcctcctggcgatgcttttgacattatagcacagtctcctcccatcacttgtcacagaaaacatcagggtcttggaacaccagagatccacctaactgctcatcctaagaagggacttgttattgggttttggcagatgtcagatttttgttttctttctttcagcctgaattctaagcaacaacttcaggttgggggcctaaacttgttcctgcctccctcaccccaccccgccccacccccagccctggcccttggcttctctcacccctcccaaattaaatggactccagatgaaaatgccaaattgtcatagtgacaccagtggttcgtcagctcctgtgcattctcctctaagaactcacctccgttagcgcactgtgtcagcgggctatggacaaggaagaatagtggcagatgcagccagcgctggctagggctgggagggttttgctctcctatgcaatatttatgccttctcattcagaactgtaagatgatcgcgcagggcatcatgtcaccatgtcaggtccggaggggaggtattaagaatagatacgatattacaccatttcctataggagtatgtaaatgaacaggcttctaaaaggttgagacactggttttttttttt

SEQ ID NO: 452 - protein, 984 aa, Homo sapiens
MALDYLLLLLLASAVAAMEETLMDTRTATAELGWTANPASGWEEVSGYDENLNTIRTYQVCNVFEPNQNNWLLTTFINRRGAHRIYTEMRFTVRDCSSLPNVPGSCKETFNLYYYETDSVIATKKSAFWSEAPYLKVDTIAADESFSQVDFGGRLMKVNTEVRSFGPLTRNGFYLAFQDYGACMSLLSVRVFFKKCPSIVQNFAVFPETMTGAESTSLVIARGTCIPNAEEVDVPIKLYCNGDGEWMVPIGRCTCKPGYEPENSVACKACPAGTFKASQEAEGCSHCPSNSRSPAEASPICTCRTGYYRADFDPPEVACTSVPSGPRNVISIVNETSIILEWHPPRETGGRDDVTYNIICKKCRADRRSCSRCDDNVEFVPRQLGLTECRVSISSLWAHTPYTFDIQAINGVSSKSPFPPQHVSVNITTNQAAPSTVPIMHQVSATMRSITLSWPQPEQPNGIILDYEIRYYEKEHNEFNSSMARSQTNTARIDGLRPGMVYVVQVRARTVAGYGKFSGKMCFQTLTDDDYKSELREQLPLIAGSAAAGVVFVVSLVAISIVCSRKRAYSKEAVYSDKLQHYSTGRGSPGMKIYIDPFTYEDPNEAVREFAKEIDVSFVKIEEVIGAGEFGEVYKGRLKLPGKREIYVAIKTLKAGYSEKQRRDFLSEASIMGQFDHPNIIRLEGVVTKSRPVMIITEFMENGALDSFLRQNDGQFTVIQLVGMLRGIAAGMKYLAEMNYVHRDLAARNILVNSNLVCKVSDFGLSRYLQDDTSDPTYTSSLGGKIPVRWTAPEAIAYRKFTSASDVWSYGIVMWEVMSFGERPYWDMSNQDVINAIEQDYRLPPPMDCPAALHQLMLDCWQKDRNSRPRFAEIVNTLDKMIRNPASLKTVATITAVPSQPLLDRSIPDFTAFTTVDDWLSAIKMVQYRDSFLTAGFTSLQLVTQMTSEDLLRIGITLAGHQKKILNSIHSMRVQISQSPTAMA

SEQ ID NO: 453 - DNA, 3865 bp, Homo sapiens
cacatgcacacccacacccacgcgcgcccgcaccgccccacgcgcacacactcctgcccacgcccacgcagcgctccgggaagtccggtccgggcgagagcgcgaaaggataccgagaagccacccgcggagagcgcagcggcgccctgggacgcggcgctctcccggcgctgctgcctcggcttggtctcggcctgcgggccgtcggccggcgatggccctggattatctactactgctcctcctggcatccgcagtggctgcgatggaagaaacgttaatggacaccagaacggctactgcagagctgggctggacggccaatcctgcgtccgggtgggaagaagtcagtggctacgatgaaaacctgaacaccatccgcacctaccaggtgtgcaatgtcttcgagcccaaccagaacaattggctgctcaccaccttcatcaaccggcggggggcccatcgcatctacacagagatgcgcttcactgtgagagactgcagcagcctccctaatgtcccaggatcctgcaaggagaccttcaacttgtattactatgagactgactctgtcattgccaccaagaagtcagccttctggtctgaggccccctacctcaaagtagacaccattgctgcagatgagagcttctcccaggtggactttgggggaaggctgatgaaggtaaacacagaagtcaggagctttgggcctcttactcggaatggtttttacctcgcttttcaggattatggagcctgtatgtctcttctttctgtccgtgtcttcttcaaaaagtgtcccagcattgtgcaaaattttgcagtgtttccagagactatgacaggggcagagagcacatctctggtgattgctcggggcacatgcatccccaacgcagaggaagtggacgtgcccatcaaactctactgcaacggggatggggaatggatggtgcctattgggcgatgcacctgcaagcctggctatgagcctgagaacagcgtggcatgcaaggcttgccctgcagggacattcaaggccagccaggaagctgaaggctgctcccactgcccctccaacagccgctcccctgcagaggcgtctcccatctgcacctgtcggaccggttattaccgagcggactttgaccctccagaagtggcatgcactagcgtcccatcaggtccccgcaatgttatctccatcgtcaatgagacgtccatcattctggagtggcaccctccaagggagacaggtgggcgggatgatgtgacctacaacatcatctgcaaaaagtgccgggcagaccgccggagctgctcccgctgtgacgacaatgtggagtttgtgcccaggcagctgggcctgacggagtgccgcgtctccatcagcagcctgtgggcccacaccccctacacctttgacatccaggccatcaatggagtctccagcaagagtcccttccccccacagcacgtctctgtcaacatcaccacaaaccaagccgccccctccaccgttcccatcatgcaccaagtcagtgccactatgaggagcatcaccttgtcatggccacagccggagcagcccaatggcatcatcctggactatgagatccggtactatgagaaggaacacaatgagttcaactcctccatggccaggagtcagaccaacacagcaaggattgatgggctgcggcctggcatggtatatgtggtacaggtgcgtgcccgcactgttgctggctacggcaagttcagtggcaagatgtgcttccagactctgactgacgatgattacaagtcagagctgagggagcagctgcccctgattgctggctcggcagcggccggggtcgtgttcgttgtgtccttggtggccatctctatcgtctgtagcaggaaacgggcttatagcaaagaggctgtgtacagcgataagctccagcattacagcacaggccgaggctccccagggatgaagatctacattgaccccttcacttatgaggatcccaacgaagctgtccgggagtttgccaaggagattgatgtatcttttgtgaaaattgaagaggtcatcggagcaggggagtttggagaagtgtacaaggggcgtttgaaactgccaggcaagagggaaatctacgtggccatcaagaccctgaaggcagggtactcggagaagcagcgtcgggactttctgagtgaggcgagcatcatgggccagttcgaccatcctaacatcattcgcctggagggtgtggtcaccaagagtcggcctgtcatgatcatcacagagttcatggagaatggtgcattggattctttcctcaggcaaaatgacgggcagttcaccgtgatccagcttgtgggtatgctcaggggcatcgctgctggcatgaagtacctggctgagatgaattatgtgcatcgggacctggctgctaggaacattctggtcaacagtaacctggtgtgcaaggtgtccgactttggcctctcccgctacctccaggatgacacctcagatcccacctacaccagctccttgggagggaagatccctgtgagatggacagctccagaggccatcgcctaccgcaagttcacttcagccagcgacgtttggagctatgggatcgtcatgtgggaagtcatgtcatttggagagagaccctattgggatatgtccaaccaagatgtcatcaatgccatcgagcaggactaccggctgcccccacccatggactgtccagctgctctacaccagctcatgctggactgttggcagaaggaccggaacagccggccccggtttgcggagattgtcaacaccctagataagatgatccggaacccggcaagtctcaagactgtggcaaccatcaccgccgtgccttcccagcccctgctcgaccgctccatcccagacttcacggcctttaccaccgtggatgactggctcagcgccatcaaaatggtccagtacagggacagcttcctcactgctggcttcacctccctccagctggtcacccagatgacatcagaagacctcctgagaataggcatcaccttggcaggccatcagaagaagatcctgaacagcattcattctatgagggtccagataagtcagtcaccaacggcaatggcatgagaactcttgtttcttggggaaggagaggagggaaaaggaccagggtcaagggggaccagaggttgaccactgtggaatgtactggagagactggcttctcagctgaggaatgcatttccatcagtgaagaatcaaccggacctgttgctagcaggcaatctccatttctcagtgacagaagcatgtttgagatgccgtgggaaaccaaatatataataataaaaatataaaaaggtgatgttcaacagaagtgaagacaaaacaatatgcatcaggagaacaagagtaaacccagctcccactctcagtgggctgcagttgcccaaccacaggaagaaagggaaggaggtagagggaagaaacagaagcagtgttccattttcttcctcaccaatgacattcttttcttttctcctttcgtactcctccctgagagtcccctcccttctcccacactcgtttccctttgctcatgactcctgtagggaagtttcttcaaacaaaacccagctcctgagtctccagatgttgttctgtcagttgccaaaggactttgctgaccactgcatggggatccaaccaattcaattaatgtcttcatattgaagaagagatgtaccttcaattgaaaacctcgtttttcttttgtttgcattttctgcaaaaaggaaaaagaaaccacaaattggggaattc

SEQ ID NO: 454 - protein, 225 aa, Homo sapiens
MAALASSLIRQKREVREPGGSRPVSAQRRVCPRGTKSLCQKQLLILLSKVRLCGGRPARPDRGPEPQLKGIVTKLFCRQGFYLQANPDGSIQGTPEDTSSFTHFNLIPVGLRVVTIQSAKLGHYMAMNAEGLLYSSPHFTAECRFKECVFENYYVLYASALYRQRRSGRAWYLGLDKEGQVMKGNRVKKTKAAAHFLPKLLEVAMYQEPSLHSVPEASPSSPPAP

SEQ ID NO: 455 - DNA, 2763 bp, Homo sapiens
gtgggatccactgaggagtacataggctgctggatctggtggagccagcactgggcccacgggtggtaactggctgctgtggaggggggtacgtgagggggggggtctggggcttatcctcaggtcctgtgggtggggcagcgagtcggggcctgagcgtcaagagcatgccctagtgagcgggctcctctgggggagcccagcgcgctccgggcgcctgccggtttgggggtgtctcctcccggggcgctatggcggcgctggccagtagcctgatccggcagaagcgggaggtccgcgagcccgggggcagccggccggtgtcggcgcagcggcgcgtgtgtccccgcggcaccaagtccctttgccagaagcagctcctcatcctgctgtccaaggtgcgactgtgcggggggcggcccgcgcggccggaccgcggcccggagcctcagctcaaaggcatcgtcaccaaactgttctgccgccagggtttctacctccaggcgaatcccgacggaagcatccagggcaccccagaggataccagctccttcacccacttcaacctgatccctgtgggcctccgtgtggtcaccatccagagcgccaagctgggtcactacatggccatgaatgctgagggactgctctacagttcgccgcatttcacagctgagtgtcgctttaaggagtgtgtctttgagaattactacgtcctgtacgcctctgctctctaccgccagcgtcgttctggccgggcctggtacctcggcctggacaaggagggccaggtcatgaagggaaaccgagttaagaagaccaaggcagctgcccactttctgcccaagctcctggaggtggccatgtaccaggagccttctctccacagtgtccccgaggcctccccttccagtccccctgccccctgaaatgtagtccctggactggaggttccctgcactcccagtgagccagccaccaccacaacctgtctcccagtcctgctctcacccctgctgccacacacatgccctgagcagccaggtcccactaggtgctctaccctgagggagcctaggggctgactgtgacttccgaggctgctgagacccttagatctttgggcctaggagggagtcagagagggggatgtctgaagatggtcctggctgatcacttctttctttccacactcacacaaccccatgccttttcctgagatggcgctgggagttcccacatggacagccagggcataaacacttcccaccccggctcagccagttcctggagtcctgtgccccttttcattgccactgagccatttctagattcactggagctcaggattcatgtgtccttctttccctactctaccttctaccttggtctggacacattctggaacactggacaccctcgccagggccacttctgcactagggctctgtgctggaacccaggcatgctgccagccttttctctggatctgtcaggcctctgtccttgactcagatggacccctggtttccaagtagaaagaggctagatttgggccttgtctagctgttggctttggcctgaaccggaaccagtctcagatgaccacgggtttaaccttcttatcccagagacacccaattctagagctttatggagccgtacttccccctgaatcctagctctaggacatagatcatgactctcagcccttttacccaggatggagctggggcctgtatagccatattattgttctaagtaagttctagccccaccctcccgccttcttgagtgatacctattacggatgagttctggaaaagacccagctatgattcataaaaacacttctggatgaatcaagaaccatttcttgtttttcctagataattctctaaaaatatgattcttccatatagaatgctaagcttatttttacatgcagtttctagctccttcaacccagctgaggtcgtgccagggagacagagtctggagaagggcagaggaattttggaaggatccctggctcatagtagggaagctgggatgggggaggggtcaaaattatggcatgactgaacctgcatctgtgttgggtggacatgaatacttagctacctcagcaggaattccttccaggtcccctttaaagctgaggtccttagagtaatatgtccttaataaaaaggacaaatggatacagccttgaccctcccagtgaggagaccccaattcagcaataagtctcacccttctcccctacaggtcaggccaagaagggtgaaggcctcttgcactccagacctcatacgccccaacagcttctaattggatagaacttgctttaccttacagctcacaacctcagctgggttttaggtacccaaaaagggcctgtctagattttttcagaaaaacgtggagtgctaggggcagcctggaaaagatggggaacctgctagtgaactaggagggagacttccatagcctcagacttggatagggtaggctgagggggccctaagggagggactaaggctccaaggcaggtcacttttccttaggctgttctacttctggcttgttgcaagaggagtagatgccccctcacccacacaaaccccactcagtctccacccaactcctggcactgctcccaggggatcgggtctccactccagctttctcaattaaagacgatttatacaaaaaaaaaaaaaaaaaaaaaaaaaaaaaaaaaaaaaaaaaaaaaaaaaa

SEQ ID NO: 456 - protein, 873 aa, Homo sapiens
MGTSALWALWLLLALCWAPRESGATGTGRKAKCEPSQFQCTNGRCITLLWKCDGDEDCVDGSDEKNCVKKTCAESDFVCNNGQCVPSRWKCDGDPDCEDGSDESPEQCHMRTCRIHEISCGAHSTQCIPVSWRCDGENDCDSGEDEENCGNITCSPDEFTCSSGRCISRNFVCNGQDDCSDGSDELDCAPPTCGAHEFQCSTSSCIPISWVCDDDADCSDQSDESLEQCGRQPVIHTKCPASEIQCGSGECIHKKWRCDGDPDCKDGSDEVNCPSRTCRPDQFECEDGSCIHGSRQCNGIRDCVDGSDEVNCKNVNQCLGPGKFKCRSGECIDISKVCNQEQDCRDWSDEPLKECHINECLVNNGGCSHICKDLVIGYECDCAAGFELIDRKTCGDIDECQNPGICSQICINLKGGYKCECSRGYQMDLATGVCKAVGKEPSLIFTNRRDIRKIGLERKEYIQLVEQLRNTVALDADIAAQKLFWADLSQKAIFSASIDDKVGRHVKMIDNVYNPAAIAVDWVYKTIYWTDAASKTISVATLDGTKRKFLFNSDLREPASIAVDPLSGFVYWSDWGEPAKIEKAGMNGFDRRPLVTADIQWPNGITLDLIKSRLYWLDSKLHMLSSVDLNGQDRRIVLKSLEFLAHPLALTIFEDRVYWIDGENEAVYGANKFTGSELATLVNNLNDAQDIIVYHELVQPSGKNWCEEDMENGGCEYLCLPAPQINDHSPKYTCSCPSGYNVEENGRDCQSTATTVTYSETKDTNTTEISATSGLVPGGINVTTAVSEVSVPPKGTSAAWAILPLLLLVMAAVGGYLMWRNWQHKNMKSMNFDNPVYLKTTEEDLSIDIGRHSASVGHTYPAISVVSTDDDLA

SEQ ID NO: 457 - DNA, 3355 bp, Homo sapiens
acatacttcttcctccttcggaagggctggtaacttgttgagcggacggaacggcggcggcggcggcaccatccaggcgggcaccatgggcacgtccgcgctctgggcgctctggctgctgctcgcgctgtgctgggcgccccgggagagcggcgccaccggaaccgggagaaaagccaaatgtgaaccctcccaattccagtgcacaaatggtcgctgtattacgctgttgtggaaatgtgatggggatgaagactgtgttgacggcagtgatgaaaagaactgtgtaaagaagacgtgtgctgaatctgacttcgtgtgcaacaatggccagtgtgttcccagccgatggaagtgtgatggagatcctgactgcgaagatggttcagatgaaagcccagaacagtgccatatgagaacatgccgcatacatgaaatcagctgtggcgcccattctactcagtgtatcccagtgtcctggagatgtgatggtgaaaatgattgtgacagtggagaagatgaagaaaactgtggcaatataacatgtagtcccgacgagttcacctgctccagtggccgctgcatctccaggaactttgtttgcaatggccaggatgactgcagcgatggcagtgatgagctggactgtgccccgccaacctgtggcgcccatgagttccagtgcagcacctcctcctgcatccccatcagctgggtatgcgacgatgatgcagactgctccgaccaatctgatgagtccctggagcagtgtggccgtcagccagtcatacacaccaagtgtccagccagcgaaatccagtgcggctctggcgagtgcatccataagaagtggcgatgtgatggggaccctgactgcaaggatggcagtgatgaggtcaactgtccctctcgaacttgccgacctgaccaatttgaatgtgaggatggcagctgcatccatggcagcaggcagtgtaatggtatccgagactgtgtcgatggttccgatgaagtcaactgcaaaaatgtcaatcagtgcttgggccctggaaaattcaagtgcagaagtggagaatgcatagatatcagcaaagtatgtaaccaggagcaggactgcagggactggagtgatgagcccctgaaagagtgtcatataaacgaatgcttggtaaataatggtggatgttctcatatctgcaaagacctagttataggctacgagtgtgactgtgcagctgggtttgaactgatagataggaaaacctgtggagatattgatgaatgccaaaatccaggaatctgcagtcaaatttgtatcaacttaaaaggcggttacaagtgtgaatgtagtcgtggctatcaaatggatcttgctactggcgtgtgcaaggcagtaggcaaagagccaagtctgatcttcactaatcgaagagacatcaggaagattggcttagagaggaaagaatatatccaactagttgaacagctaagaaacactgtggctctcgatgctgacattgctgcccagaaactattctgggccgatctaagccaaaaggctatcttcagtgcctcaattgatgacaaggttggtagacatgttaaaatgatcgacaatgtctataatcctgcagccattgctgttgattgggtgtacaagaccatctactggactgatgcggcttctaagactatttcagtagctaccctagatggaaccaagaggaagttcctgtttaactctgacttgcgagagcctgcctccatagctgtggacccactgtctggctttgtttactggtcagactggggtgaaccagctaaaatagaaaaagcaggaatgaatggattcgatagacgtccactggtgacagcggatatccagtggcctaacggaattacacttgaccttataaaaagtcgcctctattggcttgattctaagttgcacatgttatccagcgtggacttgaatggccaagatcgtaggatagtactaaagtctctggagttcctagctcatcctcttgcactaacaatatttgaggatcgtgtctactggatagatggggaaaatgaagcagtctatggtgccaataaattcactggatcagagctagccactctagtcaacaacctgaatgatgcccaagacatcattgtctatcatgaacttgtacagccatcaggtaaaaattggtgtgaagaagacatggagaatggaggatgtgaatacctatgcctgccagcaccacaaattaatgatcactctccaaaatatacctgttcctgtcccagtgggtacaatgtagaggaaaatggccgagactgtcaaagtactgcaactacwgtgacttacagtgagacaaaagatacgaacacaacagaaatttcagcaactagtggactagttcctggagggatcaatgtgaccacagcagtatcagaggtcagtgttcccccaaaagggacttctgccgcatgggccattcttcctctcttgctcttagtgatggcagcagtaggtggctacttgatgtggcggaattggcaacacaagaacatgaaaagcatgaactttgacaatcctgtgtacttgaaaaccactgaagaggacctctccatagacattggtagacacagtgcttctgttggacacacgtacccagcaatatcagttgtaagcacagatgatgatctagcttgacttctgtgacaaatgttgacctttgaggtctaaacaaataatacccccgtcggaatggtaaccgagccagcagctgaagtctctttttcttcctctcggctggaagaacatcaagatacctttgcgtggatcaagcttgtgtacttgaccgtttttatattacttttgtaaatattcttgtccacattctacttcagctttggatgtggttaccgagtatctgtaacccttgaatttctagacagtattgccacctctggccaaatatgcactttccctagaaagccatattccagcagtgaaacttgtgctatagtgtataccacctgtacatacattgtataggccatctgtaaatatcccagagaacaatcactattcttaagcactttgaaaatatttctatgtaaattattgtaaactttttcaatggttgggacaatggcaataggacaaaacgggttactaagatgaaattgccaaaaaaatttataaactaattttgtacgtatgaatgatatctttgacctcaatggaggtttgcaaagactgagtgttcaaactactgtacatttttttcaagtgctaaaaaaattaaaccagcagcttaaaaaaaaaaaaaaaaaaaaaaaaaaaaaaaaaaaaaaa

SEQ ID NO: 458 - protein, 695 aa, Homo sapiens
MALLLVSLLAFLSLGSGCHHRICHCSNRVFLCQESKVTEIPSDLPRNAIELRFVLTKLRVIQKGAFSGFGDLEKIEISQNDVLEVIEADVFSNLPKLHEIRIEKANNLLYINPEAFQNLPNLQYLLISNTGIKHLPDVHKIHSLQKVLLDIQDNINIHTIERNSFVGLSFESVILWLNKNGIQEIHNCAFNGTQLDELNLSDNNNLEELPNDVFHGASGPVILDISRTRIHSLPSYGLENLKKLRARSTYNLKKLPTLEKLVALMEASLTYPSHCCAFANWRRQISELHPICNKSILRQEVDYMTQARGQRSSLAEDNESSYSRGFDMTYTEFDYDLCNEVVDVTCSPKPDAFNPCEDIMGYNILRVLIWFISILAITGNIIVLVILTTSQYKLTVPRFLMCNLAFADLCIGIYLLLIASVDIHTKSQYHNYAIDWQTGAGCDAAGFFTVFASELSVYTLTAITLERWHTITHAMQLDCKVQLRHAASVMVMGWIFAFAAALFPIFGISSYMKVSICLPMDIDSPLSQLYVMSLLVLNVLAFVVICGCYIHIYLTVRNPNIVSSSSDTRIAKRMAMLIFTDFLCMAPISFFAISASLKVPLITVSKAKILLVLFHPINSCANPFLYAIFTKNFRRDFFILLSKCGCYEMQAQIYRTETSSTVHNTHPRNGHCSSAPRVTSGSTYILVPLSHLAQN

SEQ ID NO: 459 - DNA, 2382 bp, Homo sapiens
tgtggagcttctgagatctgtggaggtttttctctgcaaatgcaggaagaaatcaggtggatggatgcataattatggccctgctcctggtctctttgctggcattcctgagcttgggctcaggatgtcatcatcggatctgtcactgctctaacagggtttttctctgccaagagagcaaggtgacagagattccttctgacctcccgaggaatgccattgaactgaggtttgtcctcaccaagcttcgagtcatccaaaaaggtgcattttcaggatttggggacctggagaaaatagagatctctcagaatgatgtcttggaggtgatagaggcagatgtgttctccaaccttcccaaattacatgaaattagaattgaaaaggccaacaacctgctctacatcaaccctgaggccttccagaaccttcccaaccttcaatatctgttaatatccaacacaggtattaagcaccttccagatgttcacaagattcattctctccaaaaagttttacttgacattcaagataacataaacatccacacaattgaaagaaattctttcgtggggctgagctttgaaagtgtgattctatggctgaataagaatgggattcaagaaatacacaactgtgcattcaatggaacccaactagatgagctgaatctaagcgataataataatttagaagaattgcctaatgatgttttccacggagcctctggaccagtcattctagatatttcaagaacaaggatccattccctgcctagctatggcttagaaaatcttaagaagctgagggccaggtcgacttacaacttaaaaaagctgcctactctggaaaagcttgtcgccctcatggaagccagcctcacctatcccagccattgctgtgcctttgcaaactggagacggcaaatctctgagcttcatccaatttgcaacaaatctattttaaggcaagaagttgattatatgactcaggctaggggtcagagatcctctctggcagaagacaatgagtccagctacagcagaggatttgacatgacgtacactgagtttgactatgacttatgcaatgaagtggttgacgtgacctgctcccctaagccagatgcattcaacccatgtgaagatatcatggggtacaacatcctcagagtcctgatatggtttatcagcatcctggccatcactgggaacatcatagtgctagtgatcctaactaccagccaatataaactcacagtccccaggttccttatgtgcaacctggcctttgctgatctctgcattggaatctacctgctgctcattgcatcagttgatatccataccaagagccaatatcacaactatgccattgactggcaaactggggcaggctgtgatgctgctggctttttcactgtctttgccagtgagctgtcagtctacactctgacagctatcaccttggaaagatggcataccatcacgcatgccatgcagctggactgcaaggtgcagctccgccatgctgccagtgtcatggtgatgggctggatttttgcttttgcagctgccctctttcccatctttggcatcagcagctacatgaaggtgagcatctgcctgcccatggatattgacagccctttgtcacagctgtatgtcatgtccctccttgtgctcaatgtcctggcctttgtggtcatctgtggctgctatatccacatctacctcacagtgcggaaccccaacatcgtgtcctcctctagtgacaccaggatcgccaagcgcatggccatgctcatcttcactgacttcctctgcatggcacccatttctttctttgccatttctgcctccctcaaggtgcccctcatcactgtgtccaaagcaaagattctgctggttctgtttcaccccatcaactcctgtgccaaccccttcctctatgccatctttaccaaaaactttcgcagagatttcttcattctgctgagcaagtgtggctgctatgaaatgcaagcccaaatttataggacagaaacttcatccactgtccacaacacccatccaaggaatggccactgctcttcagctcccagagtcaccagtggttccacttacatacttgtccctctaagtcatttagcccaaaactaaaacacaatgtgaaaatgtatctgagtattgaatgataattcagtcttgcctttgaagggtatgtcacaaagagctgacagtgcttctacacatttcatctaatttaatattcctggcatacctttaaggtaaattggtcaggaactattaattccatgtgatacattaggaagctgaattattagtaacaacaataataattaaagaatgcaatactgta

SEQ ID NO: 460 - protein, 2471 aa, Homo sapiens
MPALRPALLWALLALWLCCAAPAHALQCRDGYEPCVNEGMCVTYHNGTGYCKCPEGFLGEYCQHRDPCEKNRCQNGGTCVAQAMLGKATCRCASGFTGEDCQYSTSHPCFVSRPCLNGGTCHMLSRDTYECTCQVGFTGKECQWTDACLSHPCANGSTCTTVANQFSCKCLTGFTGQKCETDVNECDIPGHCQHGGTCLNLPGSYQCQCPQGFTGQYCDSLYVPCAPSPCVNGGTCRQTGDFTFECNCLPGFEGSTCERNIDDCPNHRCQNGGVCVDGVNTYNCRCPPQWTGQFCTEDVDECLLQPNACQNGGTCANRNGGYGCVCVNGWSGDDCSENIDDCAFASCTPGSTCIDRVASFSCMCPEGKAGLLCHLDDACISNPCHKGALCDTNPLNGQYICTCPQGYKGADCTEDVDECAMANSNPCEHAGKCVNTDGAFHCECLKGYAGPRCEMDINECHSDPCQNDATCLDKIGGFTCLCMPGFKGVHCELEINECQSNPCVNNGQCVDKVNRFQCLCPPGFTGPVCQIDIDDCSSTPCLNGAKCIDHPNGYECQCATGFTGVLCEENIDNCDPDPCHHGQCQDGIDSYTCICNPGYMGAICSDQIDECYSSPCLNDGRCIDLVNGYQCNCQPGTSGVNCEINFDDCASNPCIHGICMDGINRYSCVCSPGFTGQRCNIDIDECASNPCRKGATCINGVNGFRCICPEGPHHPSCYSQVNECLSNPCIHGNCTGGLSGYKCLCDAGWVGINCEVDKNECLSNPCQNGGTCDNLVNGYRCTCKKGFKGYNCQVNIDECASNPCLNQGTCFDDISGYTCHCVLPYTGKNCQTVLAPCSPNPCENAAVCKESPNFESYTCLCAPGWQGQRCTIDIDECISKPCMNHGLCHNTQGSYMCECPPGFSGMDCEEDIDDCLANPCQNGGSCMDGVNTFSCLCLPGFTGDKCQTDMNECLSEPCKNGGTCSDYVNSYTCKCQAGFDGVHCENNINECTESSCFNGGTCVDGINSFSCLCPVGFTGSFCLHEINECSSHPCLNEGTCVDGLGTYRCSCPLGYTGKNCQTLVNLCSRSPCKNKGTCVQKKAESQCLCPSGWAGAYCDVPNVSCDIAASRRGVLVEHLCQHSGVCINAGNTHYCQCPLGYTGSYCEEQLDECASNPCQHGATCSDFIGGYRCECVPGYQGVNCEYEVDECQNQPCQNGGTCIDLVNHFKCSCPPGTRGLLCEENIDDCARGPHCLNGGQCMDRIGGYSCRCLPGFAGERCEGDINECLSNPCSSEGSLDCIQLTNDYLCVCRSAFTGRHCETFVDVCPQMPCLNGGTCAVASNMPDGFICRCPPGFSGARCQSSCGQVKCRKGEQCVHTASGPRCFCPSPRDCESGCASSPCQHGGSCHPQRQPPYYSCQCAPPFSGSRCELYTAPPSTPPATCLSQYCADKARDGVCDEACNSHACQWDGGDCSLTMENPWANCSSPLPCWDYINNQCDELCNTVECLFDNFECQGNSKTCKYDKYCADHFKDNHCDQGCNSEECGWDGLDCAADQPENLAEGTLVIVVLMPPEQLLQDARSFLRALGTLLHTNLRIKRDSQGELMVYPYYGEKSAAMKKQRMTRRSLPGEQEQEVAGSKVFLEIDNRQCVQDSDHCFKNTDAAAALLASHAIQGTLSYPLVSVVSESLTPERTQLLYLLAVAVVIILFIILLGVIMAKRKRKHGSLWLPEGFTLRRDASNHKRREPVGQDAVGLKNLSVQVSEANLIGTGTSEHWVDDEGPQPKKVKAEDEALLSEEDDPIDRRPWTQQHLEAADIRRTPSLALTPPQAEQEVDVLDVNVRGPDGCTPLMLASLRGGSSDLSDEDEDAEDSSANIITDLVYQGASLQAQTDRTGEMALHLAARYSRADAAKRLLDAGADANAQDNMGRCPLHAAVAADAQGVFQILIRNRVTDLDARMNDGTTPLILAARLAVEGMVAELINCQADVNAVDDHGKSALHWAAAVNNVEATLLLLKNGANRDMQDNKEETPLFLAAREGSYEAAKILLDHFANRDITDHMDRLPRDVARDRMHHDIVRLLDEYNVTPSPPGTVLTSALSPVICGPNRSFLSLKHTPMGKKSRRPSAKSTMPTSLPNLAKEAKDAKGSRRKKSLSEKVQLSESSVTLSPVDSLESPHTYVSDTTSSPMITSPGILQASPNPMLATAAPPAPVHAQHALSFSNLHEMQPLAHGASTVLPSVSQLLSHHHIVSPGSGSAGSLSRLHPVPVPADWMNRMEVNETQYNEMFGMVLAPAEGTHPGIAPQSRPPEGKHITTPREPLPPIVTFQLIPKGSIAQPAGAPQPQSTCPPAVAGPLPTMYQIPEMARLPSVAFPTAMMPQQDGQVAQTILPAYHPFPASVGKYPTPPSQHSYASSNAAERTPSHSGHLQGEHPYLTPSPESPDQWSSSSPHSASDWSDVTTSPTPGGAGGGQRGPGTHMSEPPHNNMQVYA

SEQ ID NO: 461 - DNA, 11433 bp, Homo sapiens
aggctgcttcgttgcacacccgagaaagtttcagccaaacttcgggcggcggctgaggcggcggccgaggagcggcggactcggggcgcggggagtcgaggcatttgcgcctgggcttcggagcgtagcgccagggcctgagcctttgaagcaggaggaggggaggagagagtggggctcctctatcgggaccccctccccatgtggatctgcccaggcggcggcggcggcggcggaggaggaggcgaccgagaagatgcccgccctgcgccccgctctgctgtgggcgctgctggcgctctggctgtgctgcgcggcccccgcgcatgcattgcagtgtcgagatggctatgaaccctgtgtaaatgaaggaatgtgtgttacctaccacaatggcacaggatactgcaaatgtccagaaggcttcttgggggaatattgtcaacatcgagacccctgtgagaagaaccgctgccagaatggtgggacttgtgtggcccaggccatgctggggaaagccacgtgccgatgtgcctcagggtttacaggagaggactgccagtactcaacatctcatccatgctttgtgtctcgaccctgcctgaatggcggcacatgccatatgctcagccgggatacctatgagtgcacctgtcaagtcgggtttacaggtaaggagtgccaatggacggatgcctgcctgtctcatccctgtgcaaatggaagtacctgtaccactgtggccaaccagttctcctgcaaatgcctcacaggcttcacagggcagaaatgtgagactgatgtcaatgagtgtgacattccaggacactgccagcatggtggcacctgcctcaacctgcctggttcctaccagtgccagtgccctcagggcttcacaggccagtactgtgacagcctgtatgtgccctgtgcaccctcaccttgtgtcaatggaggcacctgtcggcagactggtgacttcacttttgagtgcaactgccttccaggttttgaagggagcacctgtgagaggaatattgatgactgccctaaccacaggtgtcagaatggaggggtttgtgtggatggggtcaacacttacaactgccgctgtcccccacaatggacaggacagttctgcacagaggatgtggatgaatgcctgctgcagcccaatgcctgtcaaaatgggggcacctgtgccaaccgcaatggaggctatggctgtgtatgtgtcaacggctggagtggagatgactgcagtgagaacattgatgattgtgccttcgcctcctgtactccaggctccacctgcatcgaccgtgtggcctccttctcttgcatgtgcccagaggggaaggcaggtctcctgtgtcatctggatgatgcatgcatcagcaatccttgccacaagggggcactgtgtgacaccaaccccctaaatgggcaatatatttgcacctgcccacaaggctacaaaggggctgactgcacagaagatgtggatgaatgtgccatggccaatagcaatccttgtgagcatgcaggaaaatgtgtgaacacggatggcgccttccactgtgagtgtctgaagggttatgcaggacctcgttgtgagatggacatcaatgagtgccattcagacccctgccagaatgatgctacctgtctggataagattggaggcttcacatgtctgtgcatgccaggtttcaaaggtgtgcattgtgaattagaaataaatgaatgtcagagcaacccttgtgtgaacaatgggcagtgtgtggataaagtcaatcgtttccagtgcctgtgtcctcctggtttcactgggccagtttgccagattgatattgatgactgttccagtactccgtgtctgaatggggcaaagtgtatcgatcacccgaatggctatgaatgccagtgtgccacaggtttcactggtgtgttgtgtgaggagaacattgacaactgtgaccccgatccttgccaccatggtcagtgtcaggatggtattgattcctacacctgcatctgcaatcccgggtacatgggcgccatctgcagtgaccagattgatgaatgttacagcagcccttgcctgaacgatggtcgctgcattgacctggtcaatggctaccagtgcaactgccagccaggcacgtcaggggttaattgtgaaattaattttgatgactgtgcaagtaacccttgtatccatggaatctgtatggatggcattaatcgctacagttgtgtctgctcaccaggattcacagggcagagatgtaacattgacattgatgagtgtgcctccaatccctgtcgcaagggtgcaacatgtatcaacggtgtgaatggtttccgctgtatatgccccgagggaccccatcaccccagctgctactcacaggtgaacgaatgcctgagcaatccctgcatccatggaaactgtactggaggtctcagtggatataagtgtctctgtgatgcaggctgggttggcatcaactgtgaagtggacaaaaatgaatgcctttcgaatccatgccagaatggaggaacttgtgacaatctggtgaatggatacaggtgtacttgcaagaagggctttaaaggctataactgccaggtgaatattgatgaatgtgcctcaaatccatgcctgaaccaaggaacctgctttgatgacataagtggctacacttgccactgtgtgctgccatacacaggcaagaattgtcagacagtattggctccctgttccccaaacccttgtgagaatgctgctgtttgcaaagagtcaccaaattttgagagttatacttgcttgtgtgctcctggctggcaaggtcagcggtgtaccattgacattgacgagtgtatctccaagccctgcatgaaccatggtctctgccataacacccagggcagctacatgtgtgaatgtccaccaggcttcagtggtatggactgtgaggaggacattgatgactgccttgccaatccttgccagaatggaggttcctgtatggatggagtgaatactttctcctgcctctgccttccgggtttcactggggataagtgccagacagacatgaatgagtgtctgagtgaaccctgtaagaatggagggacctgctctgactacgtcaacagttacacttgcaagtgccaggcaggatttgatggagtccattgtgagaacaacatcaatgagtgcactgagagctcctgtttcaatggtggcacatgtgttgatgggattaactccttctcttgcttgtgccctgtgggtttcactggatccttctgcctccatgagatcaatgaatgcagctctcatccatgcctgaatgagggaacgtgtgttgatggcctgggtacctaccgctgcagctgccccctgggctacactgggaaaaactgtcagaccctggtgaatctctgcagtcggtctccatgtaaaaacaaaggtacttgcgttcagaaaaaagcagagtcccagtgcctatgtccatctggatgggctggtgcctattgtgacgtgcccaatgtctcttgtgacatagcagcctccaggagaggtgtgcttgttgaacacttgtgccagcactcaggtgtctgcatcaatgctggcaacacgcattactgtcagtgccccctgggctatactgggagctactgtgaggagcaactcgatgagtgtgcgtccaacccctgccagcacggggcaacatgcagtgacttcattggtggatacagatgcgagtgtgtcccaggctatcagggtgtcaactgtgagtatgaagtggatgagtgccagaatcagccctgccagaatggaggcacctgtattgaccttgtgaaccatttcaagtgctcttgcccaccaggcactcggggcctactctgtgaagagaacattgatgactgtgcccggggtccccattgccttaatggtggtcagtgcatggataggattggaggctacagttgtcgctgcttgcctggctttgctggggagcgttgtgagggagacatcaacgagtgcctctccaacccctgcagctctgagggcagcctggactgtatacagctcaccaatgactacctgtgtgtttgccgtagtgcctttactggccggcactgtgaaaccttcgtcgatgtgtgtccccagatgccctgcctgaatggagggacttgtgctgtggccagtaacatgcctgatggtttcatttgccgttgtcccccgggattttccggggcaaggtgccagagcagctgtggacaagtgaaatgtaggaagggggagcagtgtgtgcacaccgcctctggaccccgctgcttctgccccagtccccgggactgcgagtcaggctgtgccagtagcccctgccagcacgggggcagctgccaccctcagcgccagcctccttattactcctgccagtgtgccccaccattctcgggtagccgctgtgaactctacacggcaccccccagcacccctcctgccacctgtctgagccagtattgtgccgacaaagctcgggatggcgtctgtgatgaggcctgcaacagccatgcctgccagtgggatgggggtgactgttctctcaccatggagaacccctgggccaactgctcctccccacttccctgctgggattatatcaacaaccagtgtgatgagctgtgcaacacggtcgagtgcctgtttgacaactttgaatgccaggggaacagcaagacatgcaagtatgacaaatactgtgcagaccacttcaaagacaaccactgtgaccaggggtgcaacagtgaggagtgtggttgggatgggctggactgtgctgctgaccaacctgagaacctggcagaaggtaccctggttattgtggtattgatgccacctgaacaactgctccaggatgctcgcagcttcttgcgggcactgggtaccctgctccacaccaacctgcgcattaagcgggactcccagggggaactcatggtgtacccctattatggtgagaagtcagctgctatgaagaaacagaggatgacacgcagatcccttcctggtgaacaagaacaggaggtggctggctctaaagtctttctggaaattgacaaccgccagtgtgttcaagactcagaccactgcttcaagaacacggatgcagcagcagctctcctggcctctcacgccatacaggggaccctgtcataccctcttgtgtctgtcgtcagtgaatccctgactccagaacgcactcagctcctctatctccttgctgttgctgttgtcatcattctgtttattattctgctgggggtaatcatggcaaaacgaaagcgtaagcatggctctctctggctgcctgaaggtttcactcttcgccgagatgcaagcaatcacaagcgtcgtgagccagtgggacaggatgctgtggggctgaaaaatctctcagtgcaagtctcagaagctaacctaattggtactggaacaagtgaacactgggtcgatgatgaagggccccagccaaagaaagtaaaggctgaagatgaggccttactctcagaagaagatgaccccattgatcgacggccatggacacagcagcaccttgaagctgcagacatccgtaggacaccatcgctggctctcacccctcctcaggcagagcaggaggtggatgtgttagatgtgaatgtccgtggcccagatggctgcaccccattgatgttggcttctctccgaggaggcagctcagatttgagtgatgaagatgaagatgcagaggactcttctgctaacatcatcacagacttggtctaccagggtgccagcctccaggcccagacagaccggactggtgagatggccctgcaccttgcagcccgctactcacgggctgatgctgccaagcgtctcctggatgcaggtgcagatgccaatgcccaggacaacatgggccgctgtccactccatgctgcagtggcagctgatgcccaaggtgtcttccagattctgattcgcaaccgagtaactgatctagatgccaggatgaatgatggtactacacccctgatcctggctgcccgcctggctgtggagggaatggtggcagaactgatcaactgccaagcggatgtgaatgcagtggatgaccatggaaaatctgctcttcactgggcagctgctgtcaataatgtggaggcaactcttttgttgttgaaaaatggggccaaccgagacatgcaggacaacaaggaagagacacctctgtttcttgctgcccgggaggggagctatgaagcagccaagatcctgttagaccattttgccaatcgagacatcacagaccatatggatcgtcttccccgggatgtggctcgggatcgcatgcaccatgacattgtgcgccttctggatgaatacaatgtgaccccaagccctccaggcaccgtgttgacttctgctctctcacctgtcatctgtgggcccaacagatctttcctcagcctgaagcacaccccaatgggcaagaagtctagacggcccagtgccaagagtaccatgcctactagcctccctaaccttgccaaggaggcaaaggatgccaagggtagtaggaggaagaagtctctgagtgagaaggtccaactgtctgagagttcagtaactttatcccctgttgattccctagaatctcctcacacgtatgtttccgacaccacatcctctccaatgattacatcccctgggatcttacaggcctcacccaaccctatgttggccactgccgcccctcctgccccagtccatgcccagcatgcactatctttttctaaccttcatgaaatgcagcctttggcacatggggccagcactgtgcttccctcagtgagccagttgctatcccaccaccacattgtgtctccaggcagtggcagtgctggaagcttgagtaggctccatccagtcccagtcccagcagattggatgaaccgcatggaggtgaatgagacccagtacaatgagatgtttggtatggtcctggctccagctgagggcacccatcctggcatagctccccagagcaggccacctgaagggaagcacataaccacccctcgggagcccttgccccccattgtgactttccagctcatccctaaaggcagtattgcccaaccagcgggggctccccagcctcagtccacctgccctccagctgttgcgggccccctgcccaccatgtaccagattccagaaatggcccgtttgcccagtgtggctttccccactgccatgatgccccagcaggacgggcaggtagctcagaccattctcccagcctatcatcctttcccagcctctgtgggcaagtaccccacacccccttcacagcacagttatgcttcctcaaatgctgctgagcgaacacccagtcacagtggtcacctccagggtgagcatccctacctgacaccatccccagagtctcctgaccagtggtcaagttcatcaccccactctgcttctgactggtcagatgtgaccaccagccctacccctgggggtgctggaggaggtcagcggggacctgggacacacatgtctgagccaccacacaacaacatgcaggtttatgcgtgagagagtccacctccagtgtagagacataactgacttttgtaaatgctgctgaggaacaaatgaaggtcatccgggagagaaatgaagaaatctctggagccagcttctagaggtaggaaagagaagatgttcttattcagataatgcaagagaagcaattcgtcagtttcactgggtatctgcaaggcttattgattattctaatctaataagacaagtttgtggaaatgcaagatgaatacaagccttgggtccatgtttactctcttctatttggagaataagatggatgcttattgaagcccagacattcttgcagcttggactgcattttaagccctgcaggcttctgccatatccatgagaagattctacactagcgtcctgttgggaattatgccctggaattctgcctgaattgacctacgcatctcctcctccttggacattcttttgtcttcatttggtgcttttggttttgcacctctccgtgattgtagccctaccagcatgttatagggcaagacctttgtgcttttgatcattctggcccatgaaagcaactttggtctcctttcccctcctgtcttcccggtatcccttggagtctcacaaggtttactttggtatggttctcagcacaaacctttcaagtatgttgtttctttggaaaatggacatactgtattgtgttctcctgcatatatcattcctggagagagaaggggagaagaatacttttcttcaacaaattttgggggcaggagatcccttcaagaggctgcaccttaatttttcttgtctgtgtgcaggtcttcatataaactttaccaggaagaagggtgtgagtttgttgtttttctgtgtatgggcctggtcagtgtaaagttttatccttgatagtctagttactatgaccctccccacttttttaaaaccagaaaaaggtttggaatgttggaatgaccaagagacaagttaactcgtgcaagagccagttacccacccacaggtccccctacttcctgccaagcattccattgactgcctgtatggaacacatttgtcccagatctgagcattctaggcctgtttcactcactcacccagcatatgaaactagtcttaactgttgagcctttcctttcatatccacagaagacactgtctcaaatgttgtacccttgccatttaggactgaactttccttagcccaagggacccagtgacagttgtcttccgtttgtcagatgatcagtctctactgattatcttgctgcttaaaggcctgctcaccaatctttctttcacaccgtgtggtccgtgttactggtatacccagtatgttctcactgaagacatggactttatatgttcaagtgcaggaattggaaagttggacttgttttctatgatccaaaacagccctataagaaggttggaaaaggaggaactatatagcagcctttgctattttctgctaccatttcttttcctctgaagcggccatgacattccctttggcaactaacgtagaaactcaacagaacattttcctttcctagagtcaccttttagatgataatggacaactatagacttgctcattgttcagactgattgcccctcacctgaatccactctctgtattcatgctcttggcaatttctttgactttcttttaagggcagaagcattttagttaattgtagataaagaatagttttcttcctcttctccttgggccagttaataattggtccatggctacactgcaacttccgtccagtgctgtgatgcccatgacacctgcaaaataagttctgcctgggcattttgtagatattaacaggtgaattcccgactcttttggtttgaatgacagttctcattccttctatggctgcaagtatgcatcagtgcttcccacttacctgatttgtctgtcggtggccccatatggaaaccctgcgtgtctgttggcataatagtttacaaatggttttttcagtcctatccaaatttattgaaccaacaaaaataattacttctgccctgagataagcagattaagtttgttcattctctgctttattctctccatgtggcaacattctgtcagcctctttcatagtgtgcaaacattttatcattctaaatggtgactctctgcccttggacccatttattattcacagatggggagaacctatctgcatggacctctgtggaccacagcgtacctgcccctttctgccctcctgctccagccccacttctgaaagtatcagctactgatccagccactggatattttatatcctcccttttccttaagcacaatgtcagaccaaattgcttgtttctttttcttggactactttaatttggatcctttgggtttggagaaagggaatgtgaaagctgtcattacagacaacaggtttcagtgatgaggaggacaacactgcctttcaaactttttactgatctcttagattttaagaactcttgaattgtgtggtatctaataaaagggaaggtaagatggataatcactttctcatttgggttctgaattggagactcagtttttatgagacacatcttttatgccatgtatagatcctcccctgctatttttggtttatttttattgttataaatgctttctttctttgactcctcttctgcctgcctttggggataggtttttttgtttgtttatttgcttcctctgttttgttttaagcatcattttcttatgtgaggtggggaagggaaaggtatgagggaaagagagtctgagaattaaaatattttagtataagcaattggctgtgatgctcaaatccattgcatcctcttattgaatttgccaatttgtaatttttgcataataaagaaccaaaggtgtaatgttttgttgagaggtggtttagggattttggccctaaccaatacattgaatgtatgatgactatttgggaggacacatttatgtacccagaggcccccactaataagtggtactatggttacttccttgtgtacatttctcttaaaagtgatattatatctgtttgtatgagaaacccagtaaccaataaaatgaccgcatattcctgactaaacgtagtaaggaaaatgcacactttgtttttacttttccgtttcattctaaaggtagttaagatgaaatttatatgaaagcatttttatcacaaaataaaaaaggtttgccaagctcagtggtgttgtattttttattttccaatactgcatccatggcctggcagtgttacctcatgatgtcataatttgctgagagagcaaattttcttttctttctgaatcccacaaagcctagcaccaaacttctttttttcttcctttaattagatcataaataaatgatcctggggaaaaagcatctgtcaaataggaaacatcacaaaactgagcactcttctgtgcactagccatagctggtgacaaacagatggttgctcagggacaaggtgccttccaatggaaatgcgaagtagttgctatagcaagaattgggaactgggatataagtcataatattaattatgctgttatgtaaatgattggtttgtaacattccttaagtgaaatttgtgtagaacttaatatacaggattataaaataatattttgtgtataaatttgttataagttcacattcatacatttatttataaagtcagtgagatatttgaacatgaaaaaaaaaa

SEQ ID NO: 462 - protein, 838 aa, Homo sapiens
MSSWIRWHGPAMARLWGFCWLVVGFWRAAFACPTSCKCSASRIWCSDPSPGIVAFPRLEPNSVDPENITEIFIANQKRLEIINEDDVEAYVGLRNLTIVDSGLKFVAHKAFLKNSNLQHINFTRNKLTSLSRKHFRHLDLSELILVGNPFTCSCDIMWIKTLQEAKSSPDTQDLYCLNESSKNIPLANLQIPNCGLPSANLAAPNLTVEEGKSITLSCSVAGDPVPNMYWDVGNLVSKHMNETSHTQGSLRITNISSDDSGKQISCVAENLVGEDQDSVNLTVHFAPTITFLESPTSDHHWCIPFTVKGNPKPALQWFYNGAILNESKYICTKIHVTNHTEYHGCLQLDNPTHMNNGDYTLIAKNEYGKDEKQISAHFMGWPGIDDGANPNYPDVIYEDYGTAANDIGDTTNRSNEIPSTDVTDKTGREHLSVYAVVVIASVVGFCLLVMLFLLKLARHSKFGMKDFSWFGFGKVKSRQGVGPASVISNDDDSASPLHHISNGSNTPSSSEGGPDAVIIGMTKIPVIENPQYFGITNSQLKPDTFVQHIKRHNIVLKRELGEGAFGKVFLAECYNLCPEQDKILVAVKTLKDASDNARKDFHREAELLTNLQHEHIVKFYGVCVEGDPLIMVFEYMKHGDLNKFLRAHGPDAVLMAEGNPPTELTQSQMLHIAQQIAAGMVYLASQHFVHRDLATRNCLVGENLLVKIGDFGMSRDVYSTDYYRVGGHTMLPIRWMPPESIMYRKFTTESDVWSLGVVLWEIFTYGKQPWYQLSNNEVIECITQGRVLQRPRTCPQEVYELMLGCWQREPHMRKNIKGIHTLLQNLAKASPVYLDILG

SEQ ID NO: 463 - DNA, 4057 bp, Homo sapiens
gggagcaggagcctcgctggctgcttcgctcgcgctctacgcgctcagtccccggcggtagcaggagcctggacccaggcgccggcggcgggcgtgaggcgccggagcccggcctcgaggtgcataccggacccccattcgcatctaacaaggaatctgcgccccagagagtcccggacgccgccggtcggtgcccggcgcgccgggccatgcagcgacggccgccgcggagctccgagcagcggtagcgcccccctgtaaagcggttcgctatgccgggaccactgtgaaccctgccgcctgccggaacactcttcgctccggaccagctcagcctctgataagctggactcggcacgcccgcaacaagcaccgaggagttaagagagccgcaagcgcagggaaggcctccccgcacgggtgggggaaagcggccggtgcagcgcggggacaggcactcgggctggcactggctgctagggatgtcgtcctggataaggtggcatggacccgccatggcgcggctctggggcttctgctggctggttgtgggcttctggagggccgctttcgcctgtcccacgtcctgcaaatgcagtgcctctcggatctggtgcagcgacccttctcctggcatcgtggcatttccgagattggagcctaacagtgtagatcctgagaacatcaccgaaattttcatcgcaaaccagaaaaggttagaaatcatcaacgaagatgatgttgaagcttatgtgggactgagaaatctgacaattgtggattctggattaaaatttgtggctcataaagcatttctgaaaaacagcaacctgcagcacatcaattttacccgaaacaaactgacgagtttgtctaggaaacatttccgtcaccttgacttgtctgaactgatcctggtgggcaatccatttacatgctcctgtgacattatgtggatcaagactctccaagaggctaaatccagtccagacactcaggatttgtactgcctgaatgaaagcagcaagaatattcccctggcaaacctgcagatacccaattgtggtttgccatctgcaaatctggccgcacctaacctcactgtggaggaaggaaagtctatcacattatcctgtagtgtggcaggtgatccggttcctaatatgtattgggatgttggtaacctggtttccaaacatatgaatgaaacaagccacacacagggctccttaaggataactaacatttcatccgatgacagtgggaagcagatctcttgtgtggcggaaaatcttgtaggagaagatcaagattctgtcaacctcactgtgcattttgcaccaactatcacatttctcgaatctccaacctcagaccaccactggtgcattccattcactgtgaaaggcaaccccaaaccagcgcttcagtggttctataacggggcaatattgaatgagtccaaatacatctgtactaaaatacatgttaccaatcacacggagtaccacggctgcctccagctggataatcccactcacatgaacaatggggactacactctaatagccaagaatgagtatgggaaggatgagaaacagatttctgctcacttcatgggctggcctggaattgacgatggtgcaaacccaaattatcctgatgtaatttatgaagattatggaactgcagcgaatgacatcggggacaccacgaacagaagtaatgaaatcccttccacagacgtcactgataaaaccggtcgggaacatctctcggtctatgctgtggtggtgattgcgtctgtggtgggattttgccttttggtaatgctgtttctgcttaagttggcaagacactccaagtttggcatgaaagatttctcatggtttggatttgggaaagtaaaatcaagacaaggtgttggcccagcctccgttatcagcaatgatgatgactctgccagcccactccatcacatctccaatgggagtaacactccatcttcttcggaaggtggcccagatgctgtcattattggaatgaccaagatccctgtcattgaaaatccccagtactttggcatcaccaacagtcagctcaagccagacacatttgttcagcacatcaagcgacataacattgttctgaaaagggagctaggcgaaggagcctttggaaaagtgttcctagctgaatgctataacctctgtcctgagcaggacaagatcttggtggcagtgaagaccctgaaggatgccagtgacaatgcacgcaaggacttccaccgtgaggccgagctcctgaccaacctccagcatgagcacatcgtcaagttctatggcgtctgcgtggagggcgaccccctcatcatggtctttgagtacatgaagcatggggacctcaacaagttcctcagggcacacggccctgatgccgtgctgatggctgagggcaacccgcccacggaactgacgcagtcgcagatgctgcatatagcccagcagatcgccgcgggcatggtctacctggcgtcccagcacttcgtgcaccgcgatttggccaccaggaactgcctggtcggggagaacttgctggtgaaaatcggggactttgggatgtcccgggacgtgtacagcactgactactacagggtcggtggccacacaatgctgcccattcgctggatgcctccagagagcatcatgtacaggaaattcacgacggaaagcgacgtctggagcctgggggtcgtgttgtgggagattttcacctatggcaaacagccctggtaccagctgtcaaacaatgaggtgatagagtgtatcactcagggccgagtcctgcagcgaccccgcacgtgcccccaggaggtgtatgagctgatgctggggtgctggcagcgagagccccacatgaggaagaacatcaagggcatccataccctccttcagaacttggccaaggcatctccggtctacctggacattctaggctagggcccttttccccagaccgatccttcccaacgtactcctcagacgggctgagaggatgaacatcttttaactgccgctggaggccaccaagctgctctccttcactctgacagtattaacatcaaagactccgagaagctctcgagggaagcagtgtgtacttcttcatccatagacacagtattgacttctttttggcattatctctttctctctttccatctcccttggttgttcctttttctttttttaaattttctttttcttcttttttttcgtcttccctgcttcacgattcttaccctttcttttgaatcaatctggcttctgcattactattaactctgcatagacaaaggccttaacaaacgtaatttgttatatcagcagacactccagtttgcccaccacaactaacaatgccttgttgtattcctgcctttgatgtggatgaaaaaaagggaaaacaaatatttcacttaaactttgtcacttctgctgtacagatatcgagagtttctatggattcacttctatttatttattattattactgttcttattgtttttggatggcttaagcctgtgtataaaaaagaaaacttgtgttcaatctgtgaagcctttatctatgggagattaaaaccagagagaaagaagatttattatgaaccgcaatatgggaggaacaaagacaaccactgggatcagctggtgtcagtccctacttaggaaatactcagcaactgttagctgggaagaatgtattcggcaccttcccctgaggacctttctgaggagtaaaaagactactggcctctgtgccatggatgattcttttcccatcaccagaaatgatagcgtgcagtagagagcaaagatggcttccgtgagacacaagatggcgcatagtgtgctcggacacagttttgtcttcgtaggttgtgatgatagcactggtttgtttctcaagcgctatccacagaacctttgtcaacttcagttgaaaagaggtggattcatgtccagagctcatttcggggtcaggtgggaaagcc

SEQ ID NO: 464 - protein, 2313 aa, Homo sapiens
MRILKRFLACIQLLCVCRLDWANGYYRQQRKLVEEIGWSYTGALNQKNWGKKYPTCNSPKQSPINIDEDLTQVNVNLKKLKFQGWDKTSLENTFIHNTGKTVEINLTNDYRVSGGVSEMVFKASKITFHWGKCNMSSDGSEHSLEGQKFPLEMQIYCFDADRFSSFEEAVKGKGKLRALSILFEVGTEENLDFKAIIDGVESVSRFGKQAALDPFILLNLLPNSTDKYYIYNGSLTSPPCTDTVDWIVFKDTVSISESQLAVFCEVLTMQQSGYVMLMDYLQNNFREQQYKFSRQVFSSYTGKEEIHEAVCSSEPENVQADPENYTSLLVTWERPRVVYDTMIEKFAVLYQQLDGEDQTKHEFLTDGYQDLGAILNNLLPNMSYVLQIVAICTNGLYGKYSDQLIVDMPTDNPELDLFPELIGTEEIIKEEEEGKDIEEGAIVNPGRDSATNQIRKKEPQISTTTHYNRIGTKYNEAKTNRSPTRGSEFSGKGDVPNTSLNSTSQPVTKLATEKDISLTSQTVTELPPHTVEGTSASLNDGSKTVLRSPHMNLSGTAESLNTVSITEYEEESLLTSFKLDTGAEDSSGSSPATSAIPFISENISQGYIFSSENPETITYDVLIPESARNASEDSTSSGSEESLKDPSMEGNVWFPSSTDITAQPDVGSGRESFLQTNYTEIRVDESEKTTKSFSAGPVMSQGPSVTDLEMPHYSTFAYFPTEVTPHAFTPSSRQQDLVSTVNVVYSQTTQPVYNGETPLQPSYSSEVFPLVTPLLLDNQILNTTPAASSSDSALHATPVFPSVDVSFESILSSYDGAPLLPFSSASFSSELFRHLHTVSQILPQVTSATESDKVPLHASLPVAGGDLLLEPSLAQYSDVLSTTHAASETLEFGSESGVLYKTLMFSQVEPPSSDAMMHARSSGPEPSYALSDNEGSQHIFTVSYSSAIPVHDSVGVTYQGSLFSGPSHIPIPKSSLITPTASLLQPTHALSGDGEWSGASSDSEFLLPDTDGLTALNISSPVSVAEFTYTTSVFGDDNKALSKSEIIYGNETELQIPSFNEMVYPSESTVMPNMYDNVNKLNASLQETSVSISSTKGMFPGSLAHTTTKVFDHEISQVPENNFSVQPTHTVSQASGDTSLKPVLSANSEPASSDPASSEMLSPSTQLLFYETSASFSTEVLLQPSFQASDVDTLLKTVLPAVPSDPILVETPKVDKISSTMLHLIVSNSASSENMLHSTSVPVFDVSPTSHMHSASLQGLTISYASEKYEPVLLKSESSHQVVPSLYSNDELFQTANLEINQAHPPKGRHVFATPVLSIDEPLNTLINKLIHSDEILTSTKSSVTGKVFAGIPTVASDTFVSTDHSVPIGNGHVAITAVSPHRDGSVTSTKLLFPSKATSELSHSAKSDAGLVGGGEDGDTDDDGDDDDDRDSDGLSIHKCMSCSSYRESQEKVMNDSDTHENSLMDQNNPISYSLSENSEEDNRVTSVSSDSQTGMDRSPGKSPSANGLSQKHNDGKEENDIQTGSALLPLSPESKAWAVLTSDEESGSGQGTSDSLNENETSTDFSFADTNEKDADGILAAGDSEITPGFPQSPTSSVTSENSEVFHVSEAEASNSSHESRIGLAEGLESEKKAVIPLVIVSALTFICLVVLVGILIYWRKCFQTAHFYLEDSTSPRVISTPPTPIFPISDDVGAIPIKHFPKHVADLHASSGFTEEFETLKEFYQEVQSCTVDLGITADSSNHPDNKHKNRYINIVAYDHSRVKLAQLAEKDGKLTDYINANYVDGYNRPKAYIAAQGPLKSTAEDFWRMIWEHNVEVIVMITNLVEKGRRKCDQYWPADGSEEYGNFLVTQKSVQVLAYYTVRNFTLRNTKIKKGSQKGRPSGRVVTQYHYTQWPDMGVPEYSLPVLTFVRKAAYAKRHAVGPVVVHCSAGVGRTGTYIVLDSMLQQIQHEGTVNIFGFLKHIRSQRNYLVQTEEQYVFIHDTLVEAILSKETEVLDSHIHAYVNALLIPGPAGKTKLEKQFQLLSQSNIQQSDYSAALKQCNREKNRTSSIIPVERSRVGISSLSGEGTDYINASYIMGYYQSNEFIITQHPLLHTIKDFWRMIWDHNAQLVVMIPDGQNMAEDEFVYWPKDEPINCESFKVTLMAEEHKCLSNEEKLIIQDFILEATQDDYVLEVRHFQCPKWPNPDSPISKTFELISVIKEEAANRDGPMIVHDEHGGVTAGTFCALTTLMHQLEKENSVDVYQVAKMINLMRPGVFADIEQYQFLYKVILSLVSTRQEENPSTSLDSNGAALPDGNIAESLESLV

SEQ ID NO: 465 - DNA, 7941 bp, Homo sapiens
cacacatacgcacgcacgatctcacttcgatctatacactggaggattaaaacaaacaaacaaaaaaaacatttccttcgctccccctccctctccactctgagaagcagaggagccgcacggcgaggggccgcagaccgtctggaaatgcgaatcctaaagcgtttcctcgcttgcattcagctcctctgtgtttgccgcctggattgggctaatggatactacagacaacagagaaaacttgttgaagagattggctggtcctatacaggagcactgaatcaaaaaaattggggaaagaaatatccaacatgtaatagcccaaaacaatctcctatcaatattgatgaagatcttacacaagtaaatgtgaatcttaagaaacttaaatttcagggttgggataaaacatcattggaaaacacattcattcataacactgggaaaacagtggaaattaatctcactaatgactaccgtgtcagcggaggagtttcagaaatggtgtttaaagcaagcaagataacttttcactggggaaaatgcaatatgtcatctgatggatcagagcatagtttagaaggacaaaaatttccacttgagatgcaaatctactgctttgatgcggaccgattttcaagttttgaggaagcagtcaaaggaaaagggaagttaagagctttatccattttgtttgaggttgggacagaagaaaatttggatttcaaagcgattattgatggagtcgaaagtgttagtcgttttgggaagcaggctgctttagatccattcatactgttgaaccttctgccaaactcaactgacaagtattacatttacaatggctcattgacatctcctccctgcacagacacagttgactggattgtttttaaagatacagttagcatctctgaaagccagttggctgttttttgtgaagttcttacaatgcaacaatctggttatgtcatgctgatggactacttacaaaacaattttcgagagcaacagtacaagttctctagacaggtgttttcctcatacactggaaaggaagagattcatgaagcagtttgtagttcagaaccagaaaatgttcaggctgacccagagaattataccagccttcttgttacatgggaaagacctcgagtcgtttatgataccatgattgagaagtttgcagttttgtaccagcagttggatggagaggaccaaaccaagcatgaatttttgacagatggctatcaagacttgggtgctattctcaataatttgctacccaatatgagttatgttcttcagatagtagccatatgcactaatggcttatatggaaaatacagcgaccaactgattgtcgacatgcctactgataatcctgaacttgatcttttccctgaattaattggaactgaagaaataatcaaggaggaggaagagggaaaagacattgaagaaggcgctattgtgaatcctggtagagacagtgctacaaaccaaatcaggaaaaaggaaccccagatttctaccacaacacactacaatcgcatagggacgaaatacaatgaagccaagactaaccgatccccaacaagaggaagtgaattctctggaaagggtgatgttcccaatacatctttaaattccacttcccaaccagtcactaaattagccacagaaaaagatatttccttgacttctcagactgtgactgaactgccacctcacactgtggaaggtacttcagcctctttaaatgatggctctaaaactgttcttagatctccacatatgaacttgtcggggactgcagaatccttaaatacagtttctataacagaatatgaggaggagagtttattgaccagtttcaagcttgatactggagctgaagattcttcaggctccagtcccgcaacttctgctatcccattcatctctgagaacatatcccaagggtatatattttcctccgaaaacccagagacaataacatatgatgtccttataccagaatctgctagaaatgcttccgaagattcaacttcatcaggttcagaagaatcactaaaggatccttctatggagggaaatgtgtggtttcctagctctacagacataacagcacagcccgatgttggatcaggcagagagagctttctccagactaattacactgagatacgtgttgatgaatctgagaagacaaccaagtccttttctgcaggcccagtgatgtcacagggtccctcagttacagatctggaaatgccacattattctacctttgcctacttcccaactgaggtaacacctcatgcttttaccccatcctccagacaacaggatttggtctccacggtcaacgtggtatactcgcagacaacccaaccggtatacaatggtgagacacctcttcaaccttcctacagtagtgaagtctttcctctagtcacccctttgttgcttgacaatcagatcctcaacactacccctgctgcttcaagtagtgattcggccttgcatgctacgcctgtatttcccagtgtcgatgtgtcatttgaatccatcctgtcttcctatgatggtgcacctttgcttccattttcctctgcttccttcagtagtgaattgtttcgccatctgcatacagtttctcaaatccttccacaagttacttcagctaccgagagtgataaggtgcccttgcatgcttctctgccagtggctgggggtgatttgctattagagcccagccttgctcagtattctgatgtgctgtccactactcatgctgcttcagagacgctggaatttggtagtgaatctggtgttctttataaaacgcttatgttttctcaagttgaaccacccagcagtgatgccatgatgcatgcacgttcttcagggcctgaaccttcttatgccttgtctgataatgagggctcccaacacatcttcactgtttcttacagttctgcaatacctgtgcatgattctgtgggtgtaacttatcagggttccttatttagcggccctagccatataccaatacctaagtcttcgttaataaccccaactgcatcattactgcagcctactcatgccctctctggtgatggggaatggtctggagcctcttctgatagtgaatttcttttacctgacacagatgggctgacagcccttaacatttcttcacctgtttctgtagctgaatttacatatacaacatctgtgtttggtgatgataataaggcgctttctaaaagtgaaataatatatggaaatgagactgaactgcaaattccttctttcaatgagatggtttacccttctgaaagcacagtcatgcccaacatgtatgataatgtaaataagttgaatgcgtctttacaagaaacctctgtttccatttctagcaccaagggcatgtttccagggtcccttgctcataccaccactaaggtttttgatcatgagattagtcaagttccagaaaataacttttcagttcaacctacacatactgtctctcaagcatctggtgacacttcgcttaaacctgtgcttagtgcaaactcagagccagcatcctctgaccctgcttctagtgaaatgttatctccttcaactcagctcttattttatgagacctcagcttcttttagtactgaagtattgctacaaccttcctttcaggcttctgatgttgacaccttgcttaaaactgttcttccagctgtgcccagtgatccaatattggttgaaacccccaaagttgataaaattagttctacaatgttgcatctcattgtatcaaattctgcttcaagtgaaaacatgctgcactctacatctgtaccagtttttgatgtgtcgcctacttctcatatgcactctgcttcacttcaaggtttgaccatttcctatgcaagtgagaaatatgaaccagttttgttaaaaagtgaaagttcccaccaagtggtaccttctttgtacagtaatgatgagttgttccaaacggccaatttggagattaaccaggcccatcccccaaaaggaaggcatgtatttgctacacctgttttatcaattgatgaaccattaaatacactaataaataagcttatacattccgatgaaattttaacctccaccaaaagttctgttactggtaaggtatttgctggtattccaacagttgcttctgatacatttgtatctactgatcattctgttcctataggaaatgggcatgttgccattacagctgtttctccccacagagatggttctgtaacctcaacaaagttgctgtttccttctaaggcaacttctgagctgagtcatagtgccaaatctgatgccggtttagtgggtggtggtgaagatggtgacactgatgatgatggtgatgatgatgatgacagagatagtgatggcttatccattcataagtgtatgtcatgctcatcctatagagaatcacaggaaaaggtaatgaatgattcagacacccacgaaaacagtcttatggatcagaataatccaatctcatactcactatctgagaattctgaagaagataatagagtcacaagtgtatcctcagacagtcaaactggtatggacagaagtcctggtaaatcaccatcagcaaatgggctatcccaaaagcacaatgatggaaaagaggaaaatgacattcagactggtagtgctctgcttcctctcagccctgaatctaaagcatgggcagttctgacaagtgatgaagaaagtggatcagggcaaggtacctcagatagccttaatgagaatgagacttccacagatttcagttttgcagacactaatgaaaaagatgctgatgggatcctggcagcaggtgactcagaaataactcctggattcccacagtccccaacatcatctgttactagcgagaactcagaagtgttccacgtttcagaggcagaggccagtaatagtagccatgagtctcgtattggtctagctgaggggttggaatccgagaagaaggcagttataccccttgtgatcgtgtcagccctgacttttatctgtctagtggttcttgtgggtattctcatctactggaggaaatgcttccagactgcacacttttacttagaggacagtacatcccctagagttatatccacacctccaacacctatctttccaatttcagatgatgtcggagcaattccaataaagcactttccaaagcatgttgcagatttacatgcaagtagtgggtttactgaagaatttgagacactgaaagagttttaccaggaagtgcagagctgtactgttgacttaggtattacagcagacagctccaaccacccagacaacaagcacaagaatcgatacataaatatcgttgcctatgatcatagcagggttaagctagcacagcttgctgaaaaggatggcaaactgactgattatatcaatgccaattatgttgatggctacaacagaccaaaagcttatattgctgcccaaggcccactgaaatccacagctgaagatttctggagaatgatatgggaacataatgtggaagttattgtcatgataacaaacctcgtggagaaaggaaggagaaaatgtgatcagtactggcctgccgatgggagtgaggagtacgggaactttctggtcactcagaagagtgtgcaagtgcttgcctattatactgtgaggaattttactctaagaaacacaaaaataaaaaagggctcccagaaaggaagacccagtggacgtgtggtcacacagtatcactacacgcagtggcctgacatgggagtaccagagtactccctgccagtgctgacctttgtgagaaaggcagcctatgccaagcgccatgcagtggggcctgttgtcgtccactgcagtgctggagttggaagaacaggcacatatattgtgctagacagtatgttgcagcagattcaacacgaaggaactgtcaacatatttggcttcttaaaacacatccgttcacaaagaaattatttggtacaaactgaggagcaatatgtcttcattcatgatacactggttgaggccatacttagtaaagaaactgaggtgctggacagtcatattcatgcctatgttaatgcactcctcattcctggaccagcaggcaaaacaaagctagagaaacaattccagctcctgagccagtcaaatatacagcagagtgactattctgcagccctaaagcaatgcaacagggaaaagaatcgaacttcttctatcatccctgtggaaagatcaagggttggcatttcatccctgagtggagaaggcacagactacatcaatgcctcctatatcatgggctattaccagagcaatgaattcatcattacccagcaccctctccttcataccatcaaggatttctggaggatgatatgggaccataatgcccaactggtggttatgattcctgatggccaaaacatggcagaagatgaatttgtttactggccaaataaagatgagcctataaattgtgagagctttaaggtcactcttatggctgaagaacacaaatgtctatctaatgaggaaaaacttataattcaggactttatcttagaagctacacaggatgattatgtacttgaagtgaggcactttcagtgtcctaaatggccaaatccagatagccccattagtaaaacttttgaacttataagtgttataaaagaagaagctgccaatagggatgggcctatgattgttcatgatgagcatggaggagtgacggcaggaactttctgtgctctgacaacccttatgcaccaactagaaaaagaaaattccgtggatgtttaccaggtagccaagatgatcaatctgatgaggccaggagtctttgctgacattgagcagtatcagtttctctacaaagtgatcctcagccttgtgagcacaaggcaggaagagaatccatccacctctctggacagtaatggtgcagcattgcctgatggaaatatagctgagagcttagagtctttagtttaacacagaaaggggtggggggactcacatctgagcattgttttcctcttcctaaaattaggcaggaaaatcagtctagttctgttatctgttgatttcccatcacctgacagtaactttcatgacataggattctgccgccaaatttatatcattaacaatgtgtgcctttttgcaagacttgtaatttacttattatgtttgaactaaaatgattgaattttacagtatttctaagaatggaattgtggtatttttttctgtattgattttaacagaaaatttcaatttatagaggttaggaattccaaactacagaaaatgtttgtttttagtgtcaaatttttagctgtatttgtagcaattatcaggtttgctagaaatataacttttaatacagtagcctgtaaataaaacactcttccatatgatattcaacattttacaactgcagtattcacctaaagtagaaataatctgttacttattgtaaatactgccctagtgtctccatggaccaaatttatatttataattgtagatttttatattttactactgagtcaagttttctagttctgtgtaattgtttagtttaatgacgtagttcattagctggtcttactctaccagttttctgacattgtattgtgttacctaagtcattaactttgtttcagcatgtaattttaacttttgtggaaaatagaaataccttcattttgaaagaagtttttatgagaataacaccttaccaaacattgttcaaatggtttttatccaaggaattgcaaaaataaatataaatattgccattaaaaaaaaaaaaaaaaaaaaaaaaaaaaaaaaaaa

SEQ ID NO: 466 - protein, 419 aa, Homo sapiens
MHLLGFFSVACSLLAAALLPGPREAPAAAAAFESGLDLSDAEPDAGEATAYASKDLEEQLRSVSSVDELMTVLYPEYWKMYKCQLRKGGWQHNREQANLNSRTEETIKFAAAHYNTEILKSIDNEWRKTQCMPREVCIDVGKEFGVATNTFFKPPCVSVYRCGGCCNSEGLQCMNTSTSYLSKTLFEITVPLSQGPKPVTISFANHTSCRCMSKLDVYRQVHSIIRRSLPATLPQCQAANKTCPTNYMWNNHICRCLAQEDFMFSSDAGDDSTDGFHDICGPNKELDEETCQCVCRAGLRPASCGPHKELDRNSCQCVCKNKLFPSQCGANREFDENTCQCVCKRTCPRNQPLNPGKCACECTESPQKCLLKGKKFHHQTCSCYRRPCTNRQKACEPGFSYSEEVCRCVPSYWKRPQMS

SEQ ID NO: 467 - DNA, 2076 bp, Homo sapiens
cggggaaggggagggaggagggggacgagggctctggcgggtttggaggggctgaacatcgcggggtgttctggtgtcccccgccccgcctctccaaaaagctacaccgacgcggaccgcggcggcgtcctccctcgccctcgcttcacctcgcgggctccgaatgcggggagctcggatgtccggtttcctgtgaggcttttacctgacacccgccgcctttccccggcactggctgggagggcgccctgcaaagttgggaacgcggagccccggacccgctcccgccgcctccggctcgcccagggggggtcgccgggaggagcccgggggagagggaccaggaggggcccgcggcctcgcaggggcgcccgcgcccccacccctgcccccgccagcggaccggtcccccacccccggtccttccaccatgcacttgctgggcttcttctctgtggcgtgttctctgctcgccgctgcgctgctcccgggtcctcgcgaggcgcccgccgccgccgccgccttcgagtccggactcgacctctcggacgcggagcccgacgcgggcgaggccacggcttatgcaagcaaagatctggaggagcagttacggtctgtgtccagtgtagatgaactcatgactgtactctacccagaatattggaaaatgtacaagtgtcagctaaggaaaggaggctggcaacataacagagaacaggccaacctcaactcaaggacagaagagactataaaatttgctgcagcacattataatacagagatcttgaaaagtattgataatgagtggagaaagactcaatgcatgccacgggaggtgtgtatagatgtggggaaggagtttggagtcgcgacaaacaccttctttaaacctccatgtgtgtccgtctacagatgtgggggttgctgcaatagtgaggggctgcagtgcatgaacaccagcacgagctacctcagcaagacgttatttgaaattacagtgcctctctctcaaggccccaaaccagtaacaatcagttttgccaatcacacttcctgccgatgcatgtctaaactggatgtttacagacaagttcattccattattagacgttccctgccagcaacactaccacagtgtcaggcagcgaacaagacctgccccaccaattacatgtggaataatcacatctgcagatgcctggctcaggaagattttatgttttcctcggatgctggagatgactcaacagatggattccatgacatctgtggaccaaacaaggagctggatgaagagacctgtcagtgtgtctgcagagcggggcttcggcctgccagctgtggaccccacaaagaactagacagaaactcatgccagtgtgtctgtaaaaacaaactcttccccagccaatgtggggccaaccgagaatttgatgaaaacacatgccagtgtgtatgtaaaagaacctgccccagaaatcaacccctaaatcctggaaaatgtgcctgtgaatgtacagaaagtccacagaaatgcttgttaaaaggaaagaagttccaccaccaaacatgcagctgttacagacggccatgtacgaaccgccagaaggcttgtgagccaggattttcatatagtgaagaagtgtgtcgttgtgtcccttcatattggaaaagaccacaaatgagctaagattgtactgttttccagttcatcgattttctattatggaaaactgtgttgccacagtagaactgtctgtgaacagagagacccttgtgggtccatgctaacaaagacaaaagtctgtctttcctgaaccatgtggataactttacagaaatggactggagctcatctgcaaaaggcctcttgtaaagactggttttctgccaatgaccaaacagccaagattttcctcttgtgatttctttaaaagaatgactatataatttatttccactaaaaatattgtttctgcattcatttttatagcaacaacaattggtaaaactcactgtgatcaatatttttatatcatgcaaaatatgtttaaaataaaatgaaaattgtattat

SEQ ID NO: 468 - protein, 592 aa, Homo sapiens
MRVLCAFPEAMPSSNSRPPACLAPGALYLALLLHLSLSSQAGDRRPLPVDRAAGLKEKTLILLDVSTKNPVRTVNENFLSLQLDPSIIHDGWLDFLSSKRLVTLARGLSPAFLRFGGKRTDFLQFQNLRNPAKSRGGPGPDYYLKNYEDDIVRSDVALDKQKGCKIAQHPDVMLELQREKAAQMHLVLLKEQFSNTYSNLILTARSLDKLYNFADCSGLHLIFALNALRRNPNNSWNSSSALSLLKYSASKKYNISWELGNEPNNYRTMHGRAVNGSQLGKDYIQLKSLLQPIRIYSRASLYGPNIGRPRKNVIALLDGFMKVAGSTVDAVTWQHCYIDGRVVKVMDFLKTRLLDTLSDQIRKIQKVVNTYTPGKKIWLEGVVTTSAGGTNNLSDSYAAGFLWLNTLGMLANQGIDVVIRHSFFDHGYNHLVDQNFNPLPDYWLSLLYKRLIGPKVLAVHVAGLQRKPRPGRVIRDKLRIYAHCTNHHNHNYVRGSITLFIINLHRSRKKIKLAGTLRDKLVHQYLLQPYGQEGLKSKSVQLNGQPLVMVDDGTLPELKPRPLRAGRTLVIPPVTMGFFVVKNVNALACRYR

SEQ ID NO: 469 - DNA, 2096 bp, Homo sapiens
aaggacaattagtcactagcgagacccagtaggaagagaggtttaaatcagagggattgaatgagggtgctttgtgccttccctgaagccatgccctccagcaactcccgcccccccgcgtgcctagccccgggggctctctacttggctctgttgctccatctctccctttcctcccaggctggagacaggagacccttgcctgtagacagagctgcaggtttgaaggaaaagaccctgattctacttgatgtgagcaccaagaacccagtcaggacagtcaatgagaacttcctctctctgcagctggatccgtccatcattcatgatggctggctcgatttcctaagctccaagcgcttggtgaccctggcccggggactttcgcccgcctttctgcgcttcgggggcaaaaggaccgacttcctgcagttccagaacctgaggaacccggcgaaaagccgcgggggcccgggcccggattactatctcaaaaactatgaggatgacattgttcgaagtgatgttgccttagataaacagaaaggctgcaagattgcccagcaccctgatgttatgctggagctccaaagggagaaggcagctcagatgcatctggttcttttaaaggagcaattctccaatacttacagtaatctcatattaacagccaggtctctagacaaactttataactttgctgattgctctggactccacctgatatttgctctaaatgcactgcgtcgtaatcccaataactcctggaacagttctagtgccctgagtctgttgaagtacagcgccagcaaaaagtacaacatttcttgggaactgggtaatgagccaaataactatcggaccatgcatggccgggcagtaaatggcagccagttgggaaaggattacatccagctgaagagcctgttgcagcccatccggatttattccagagccagcttatatggccctaatattgggcggccgaggaagaatgtcatcgccctcctagatggattcatgaaggtggcaggaagtacagtagatgcagttacctggcaacattgctacattgatggccgggtggtcaaggtgatggacttcctgaaaactcgcctgttagacacactctctgaccagattaggaaaattcagaaagtggttaatacatacactccaggaaagaagatttggcttgaaggtgtggtgaccacctcagctggaggcacaaacaatctatccgattcctatgctgcaggattcttatggttgaacactttaggaatgctggccaatcagggcattgatgtcgtgatacggcactcattttttgaccatggatacaatcacctcgtggaccagaattttaacccattaccagactactggctctctctcctctacaagcgcctgatcggccccaaagtcttggctgtgcatgtggctgggctccagcggaagccacggcctggccgagtgatccgggacaaactaaggatttatgctcactgcacaaaccaccacaaccacaactacgttcgtgggtccattacactttttatcatcaacttgcatcgatcaagaaagaaaatcaagctggctgggactctcagagacaagctggttcaccagtacctgctgcagccctatgggcaggagggcctaaagtccaagtcagtgcaactgaatggccagcccttagtgatggtggacgacgggaccctcccagaattgaagccccgcccccttcgggccggccggacattggtcatccctccagtcaccatgggcttttttgtggtcaagaatgtcaatgctttggcctgccgctaccgataagctatcctcacactcatggctaccagtgggcctgctgggctgcttccactcctccactccagtagtatcctctgttttcagacatcctagcaaccagcccctgctgccccatcctgctggaatcaacacagacttgctctccaaagagactaaatgtcatagcgtgatcttagcctaggtaggccacatccatcccaaaggaaaatgtagacatcacctgtacctatataaggataaaggcatgtgtatagagcaaa

What is claimed is:

1. A method of identifying alternatively spliced exons, the method comprising, scoring each of a plurality of exon sequences derived from genes of a species according to at least one sequence parameter, wherein exon sequences of said plurality of exon sequences scoring above a predetermined threshold represent alternatively spliced exons, thereby identifying the alternatively spliced exons.

2. The method of claim 1, wherein said at least one sequence parameter is selected from the group consisting of:
(i) exon length;
(ii) division by 3;
(iii) conservation level between said plurality of exon sequences of genes of a species and corresponding exon sequences of genes of an ortholohgous species;
(iv) length of conserved intron sequences upstream of each of said plurality of exon sequences;
(v) length of conserved intron sequences downstream of each of said plurality of exon sequences;
(vi) conservation level of said intron sequences upstream of each of said plurality of exon sequences; and
(vii) conservation level of said intron sequences downstream of each of said plurality of exon sequences;

3. The method of claim 2, wherein said exon length does not exceed 1000 bp.

4. The method of claim 2, wherein said conservation level is at least 95%.

5. The method of claim 2, wherein said length of conserved intron sequences upstream of each of said plurality of exon sequences is at least 12.

6. The method of claim 2, wherein said length of conserved intron sequences downstream of each of said plurality of exon sequences is at least 15.

7. The method of claim 2, wherein said conservation level of said intron sequences upstream of each of said plurality of exon sequences is at least 85%.

8. The method of claim 2, wherein said conservation level of said intron sequences downstream of each of said plurality of exon sequences is at least 60%.

9. A system for generating a database of alternatively spliced exons, the system comprising a processing unit, said processing unit executing a software application configured for:
(a) scoring each of a plurality of exon sequences derived from genes of a species according to at least one sequence parameter, wherein exon sequences of said plurality of exon sequences scoring above a predetermined threshold represent alternatively spliced exons, to thereby identify the alternatively spliced exons; and
(b) storing said identified alternatively spliced exons to thereby generate the database of alternatively spliced exons.

10. The system of claim 9, wherein said at least one sequence parameter is selected from the group consisting of:
(i) exon length;
(i) division by 3;
(iii) conservation level between said plurality of exon sequences of genes of a species and corresponding exon sequences of genes of an ortholohgous species;
(iv) length of conserved intron sequences upstream of each of said plurality of exon sequences;
(v) length of conserved intron sequences downstream of each of said plurality of exon sequences;
(vi) conservation level of said intron sequences upstream of each of said plurality of exon sequences; and
(vii) conservation level of said intron sequences downstream of each of said plurality of exon sequences;

11. The system of claim 10, wherein said exon length does not exceed 1000 bp.

12. The system of claim 10, wherein said conservation level is at least 95%.

13. The system of claim 10, wherein said length of conserved intron sequences upstream of each of said plurality of exon sequences is at least 12.

14. The system of claim 10, wherein said length of conserved intron sequences downstream of each of said plurality of exon sequences is at least 15.

15. The system of claim 10, wherein said conservation level of said intron sequences upstream of each of said plurality of exon sequences is at least 85%.

16. The system of claim 10, wherein said conservation level of said intron sequences downstream of each of said plurality of exon sequences is at least 60%.

17. A computer readable storage medium comprising data stored in a retrievable manner, said data including sequence information as set forth in the files “transcripts. fasta” and “proteins.fasta” of enclosed CD-ROM1 and the files forth in the file “AnnotationForPatent.txt” of enclosed CD-ROM1.

18. A method of predicting expression products of a gene of interest, the method comprising:
(a) scoring exon sequences of the gene of interest according to at least one sequence parameter and identifying exon sequences scoring above a predetermined threshold as alternatively spliced exons of the gene of interest; and
(b) analyzing chromosomal location of each of said alternatively spliced exons with respect to coding, sequence of the gene of interest to thereby predict expression products of the gene of interest.

19. The method of claim 18, wherein said at least one sequence parameter is selected from the group consisting of:
(i) exon length;
(ii) division by 3;
(iii) conservation level between said plurality of exon sequences of genes of a species and corresponding exon sequences of genes of an
(iv) orthologous species;
(iv) length of conserved intron sequences upstream of each of said plurality of exon sequences;
(v) length of conserved intron sequences downstream of each of said plurality of exon sequences;
(vi) conservation level of said intron sequences upstream of each of said plurality of exon sequences; and
(vii) conservation level of said intron sequences downstream of each of said plurality of exon sequences;

20. The method of claim 19, wherein said exon length does not exceed 1000 bp.

21. The method of claim 19, wherein said conservation level is at least 95%.

22. The method of claim 19, wherein said length of conserved intron sequences upstream of each of said plurality of exon sequences is at least 12.

23. The method of claim 19, wherein said length of conserved intron sequences downstream of each of said plurality of exon sequences is at least 15.

24. The method of claim 19, wherein said conservation level of said intron sequences upstream of each of said plurality of exon sequences is at least 85%.

25. The method of claim 19, wherein said conservation level of said intron sequences downstream of each of said plurality of exon sequences is at least 60%.

26. A method of predicting expression products of a gene of interest in a given species, the method comprising:
(a) providing a contig of exon sequences of the gene of interest of a first species;
(b) identifying exon sequences of an orthologue of the gene of interest of said first species which align to a genome of said first species;
(c) assembling said exon sequences of said orthologue of the gene of interest in said contig, thereby generating a hybrid contig;
(d) identifying in said hybrid contig, exon sequences of said orthologue of the gene of interest, which do not align with said exon sequences of the gene of interest of said first species, thereby uncovering non-overlapping exon sequences of the gene of interest; and
(e) analyzing chromosomal location of non-overlapping exon sequences of the gene of interest with respect to the chromosomal location of the gene of interest to thereby predict expression products of the gene of interest in a given species.

27. The method of claim 26, wherein at least a portion of said exon sequences are alternatively spliced sequences.

28. The method of claim 27, wherein said alternatively spliced sequences are identified by scoring exon sequences of the gene of interest according to at least one sequence parameter, wherein exon sequences scoring above a predetermined threshold represent said alternatively spliced exons of the gene of interest.

29. The method of claim 28, wherein said at least one sequence parameter is selected from the group consisting of:
(i) exon length;
(ii) division by 3;
(iii) conservation level between said plurality of exon sequences of genes of a species and corresponding exon sequences of genes of an orthologous species;
(iv) length of conserved intron sequences upstream of each of said plurality of exon sequences;
(v) length of conserved intron sequences downstream of each of said
plurality of exon sequences;
(vi) conservation level of said intron sequences upstream of each of said plurality of exon sequences; and
(vii) conservation level of said intron sequences downstream of each of said plurality of exon sequences;

30. The method of claim 29, wherein said exon length does not exceed 1000 bp.

31. The method of claim 29, wherein said conservation level is at least 95%.

32. The method of claim 29, wherein said length of conserved intron sequences upstream of each of said plurality of exon sequences is at least 12.

33. A The method of claim 29, wherein said length of conserved intron sequences downstream of each of said plurality of exon sequences is at least 15.

34. The method of claim 29, wherein said conservation level of said intron sequences upstream of each of said plurality of exon sequences is at least 85%.

35. The method of claim 29, wherein said conservation level of said intron sequences downstream of each of said plurality of exon sequences is at least 60%.

36. An isolated polynucleotide comprising a nucleic acid sequence being at least 70% identical to a nucleic acid sequence of the sequences set forth in file “transcripts.fasta” of CD-ROM1 or in the file “transcripts” of CD-ROM2.

37. The isolated polynucleotide of claim 36, wherein said nucleic acid sequence is set forth in the file “transcripts.fasta” of enclosed CD-ROM1 or in the file “transcripts” of enclosed CD-ROM 2.

38. An isolated polynucleotide comprising a nucleic acid sequence encoding a polypeptide having an amino acid sequence at least 70% homologous to a sequence set forth in the file “proteins.fasta” of enclosed CD-ROM or in the file “proteins” of enclosed CD-ROM2.

39. An isolated polypeptide having an amino acid sequence at least 80% homologous to a sequence set forth in the file proteins.fasta” of enclosed CD-ROM1 or in the file “proteins” of enclosed CD-ROM2.

40. Use of a polynucleotide or polypeptide set forth in the file “transcripts.fasta” of CD-ROM1 or in the file “transcripts” of CD-ROM2 or in the file “proteins.fasta” of enclosed CD-ROM1 or in the file “proteins” of enclosed CD-ROM2 for the diagnosis and/or treatment of the diseases listed in Example 8.
